United States Patent Application Publication US 2024/0110199 A1 - sequence listing, part 4

SEQ ID NO: 1 - DNA, 7202153 bp, Glycine tomentella (residues 5,401,618-7,202,153 of 7,202,153)
gcagatagaaaaattcctccacctggagtcccgttgagatatctgagaattcaaaaagtagcttttttgtggtctgatgttggatcaacaacaaattgactcagttgttgcacaacaaatgtaatgtctagccttgtgttgtcagataaatcaatctacctattaaccttctataggagaaagcatcttgtattgaaagaggtgaccttgagtattgatgcaacttggtggtgtaatcacaatgtgtagaaactattttagaaccaagcatgccaatatcattgaggatgtttagtgtatactttcttccaacaaataagtaagccattgaaagcactgtcaagtagatttgtaattctttgaagttaaggcaaatcattgcctacaagacaatgtcatcaacataaacaaataaaacaacaattgtgttgtaaccatgcttaatgaacaaagaatggtcagaggtacattgcttgtatccatgagaaatcagaaaaagatgatagtctagcataccattgtctactagcctgtttcaggccatatagagacctctgaagcttgtaaactttccttggtctagctacctgcataccttgaggaatgaacatgtacacttattcattcaaatcaccatgtacgaagacattattcacatctagtttcttgagatgccactgattaatagcagctaaagtgatatgaaccaatacgggggttcattactttttacggatcgtcctcgaaaaggattcttgttataacaaaagaaaaaggtggaaaagacaagaaatgaaagaagacaccataccttatgaaaggtgataagtcccatggggattcgtcacaatgattatagaaacctttgataagaaccaatgtttggttcaattaagaacccaagagaaacttcctctcacactttgaaaagtgcaaagtttttattcaatttcaagttgagtacataagacaaatgaatggctatttatagccaaaaaatggttcctatctcctctttctttccaatgtgggacttcaatcacatattccttattcaaaattacatgtgggacttcaatcacatattccttattcaaaattacactaaaaagaagtctaattcatgctgaacttcatgtccaattttcatcatcatagatgcagaattggaacttgagactataaatacgacttgtaggaaatctttagagctttcaaaagcatcaaagaacacctaaaacagacatctagaactcaagttatgttcaaaacattagagaatctaggctcttcactcattggtctttgggctcttcactcatttggaacaattggagcaatctgaattcttcttctgggttggtctttggactcaaggcaagtttgatatgttggctcaatgcttgagaaaggaagtagttcacttcatgatccaatgcttcttgtgcttcctttgatcttgcccttgtcatggggccttccaattcttggtgctcatcataaagccagtaaaagtctcattgtagttagtttagctactggagagaaagtgtccaggtagtcctgtccttccacctaagtatacccttttgccactaacatggatttatacctctctatggaaccatcagatatgtgcttgatcttataaacccatttacaacctacgacaattttgtgctgaggaagatcaacaagaatccatgtatcattaatggctagtgctcctatctcaacattcttggcttgaatccaattaggatccttagatgcttcattgtatgactaaggttcaatagtttgtgtgatagataaaacaacatggtgataagaaggagacaatttagtatatgaaaggatagagctaagaggataaagactgatacctgtagaatgattggcagaagttgatgaaggatatatgacatggaagtctttatatttatttggcttgtgaatttgtctaatgggttttctagatgtatgaatggttggctgtaaggttaagggaacaaaatctgtattggaattagacatgacaggatcagttggtggctgtaaagatgaatcatcagactgatcaatgacattggatgaaggagtaggcataggtaggacagtgataggtttaggtttgctttgatcagtgaatggaaaacaatcttcatagaaaataacatttatagagacagaaatagacatggtcttaatatcaaaggagatatatccttttgggtgtggcctaaaacctaagaaaatagaagtaatagctcttgggttaagcttctttctattagctattaaagtactagaaaaacacagacagccaaatacccttaaagattcaatatcatatacaattccatgtagtttttcataaggagtttgattatcaagagatggggtaggcatgcaattaacaaggacagtagaatgaaccaaggcataagaccaaaaaatatgtggtaaattagattgaaataacaaggatcgagtgacattcaatagatgttgatgttttctttcaacaattccattttgttggggagtttcaacacgggaacattgatgtataatgccagtatcatcatataattgtttcatgatgaactcagatccattgtctgatcagataacctttatttttttatccaaactgtctctcaacattggcaacaaagttctttaaatgagacttgtgttttagcatttgaattcataaggaaaacccaaacaaaccttgaataatcatctacaatagtgagaaaatatttgtaaccatttaaagaagttacatggcaagggcccaaatatcaacatgtataagagcaaaagcacaagatgaatgccaatcactgctaggaaaagacaattttctttgttttgaacgatgacaagtttcacatatgaattgttcctctaatgtaagaacaggatacaattgtttcaacaacaccaatctctcataagatgtatgaccaagtcgaaaatgccacaaatctatgggtttttttattacatgaaaaggctgaaatactagaacaaatatggacattagtggaattagaattgtattccatatgaggcttgagaggaaccatgttgagtctgtagagaccttccaccaaatcaactgtaccaatcctctataggctctgtaaatcctgtataaagaatttgttattcatgaaggttagtttacaagacaaagaagagatcaatttgggtattgaaatcaaattgaattggaaactaggtatgtataaaacatcctttagatataaaaattgagaaaattaaactatgcctgcatgagtggcagtgattgtatgaccattagggaatctaacaatcacaagatttatctttttacataaaaaaaacaaatgagggaaagctgtaacatgatttgtggcacctgagtcaaggattcactcatcttgactggtcttgcttacactaaaagtgatggatagtacactacctttattgctaactatatcaatttaattcacatctgtattgttgtgaactatgttttgtccttgcagtagtgccatcaaagctttatactgctgagaggttagcttcacatcctcattttttgtttcttgtttcctttcttggattgagctatcaccttcctccttttctgcactgatattgttaatgtttgatccttgagacttgttaaatttttgttcaggggggtaaccatgttttctgtagcattcatctacagtgtggttaatgaaaccacaatatgtacatagcttagttcctcttcctcttgagtttcctctaccaaagccactttgatttccttttcctcctttggaagcataattttgaggaaaaccatttttctgtaacacctatcgacagtgtgattatctttaccatagtaagtgcacaaattcgatgagttggtgttgactgcattaaccaaactgatgtttctcattatatcattacttgcaagttgtctctcttgctgaacaacatatgagaagaccttagctatgctaggcaagggatccatcatcaatacattggacctaacagtattaaattgatcattcaaacctctaagaaattgcataactcgatcttgtttctttctctccataacactagtaagagcatcacatgtaccttaggatcacatgaacaaattggatcaggtctgtaactttccaattcatcccaaataacacacaatcttgtaaagtaatcagttatagattgatcaccttgtttgatagatgacatgtcttgctgcaattctaaaattcttagcaaatctccttgtgaatacctcgacttcaaatccttccttatgtcttgtgcatcatccatccaaagaatgttgtgcctaatcgaaagggagactgagtgaacaagccaagaaactaccatattattgcacctcttccaagtcgtatgaagtttatggttcgacacacatctttgaatggatctgtcaacaaattcaactttattttttgcactcaatgcagtaagcattaatcgactccaggaactgtaatttgttgaatcaagaattggagaaatcagtgcagtcgctagattttcttctagatgaagatagtatgggctgtgtatattgaaagattgatcttgtgaaaatgaattggtagtcatgatgaagaaatcgaaaggaaactttagaagaagaaagaacatagagtagcgtagtagagcgagctctgataccatcataaacctcatgtctgccatggataactgcaaaactttcaaaggaagcttgcaaaggaaattgaagagagaaactgaaaatagaaaggaatgaatagcctaaattgattagctgcaaaattggttattacatcagattatagttagttgctagagtaactaactcataactaactaactataataactaaattaactcttgttacatagaaactaaccaactaagctaactctagttacacaaaatgataagatttcctcccttgtctcttacacttcttccaaaccaatttgggtttttcattacttgtgcataagagcatccttctctaacgaaaactgacttatttcccatttgtctgatcccaacactatccttcgtctttatatctcccctttgttcaatttgagcttgctcgttctacctcatatatttgggtcgattgacaaacattcgcatatccccaatgcagattttgtgtaattctaactccatttccctctcattctcaactcctctaaatttgtcgaaaccacaacgctacccatacttgttgtgtcttggagatataaaaacatttgtaaccctcccacacctcccaaatgtacaccttagactaaaaattgtggaggtttcaagaaaatgagtgatgaagaacgctgatatttttccatttctccatccctgaactctctcccatccccatccccattgtttctctccccctttccattgtttctctcacctctcatccttttttattcatttaattgtaaaagctaaatttaatgaattgattatattggattactaattgttattagacggataattaactatccaatatatttttcatatataatccattgggacatgtagtttaaaattcatttgttgagcatatccgcataggtatgtcttgtttggactgatcaaaaggaattaaaatgaaaaacaaaaagggaaagaaataagaataatagaagattaattgaataaaaaatacatcgtttgaatggatggtataagaagaaaagaagtagataaatctctctttgttttttttttttcgaatctctctttgtttgtttaaattaatagaagagtaagttcaaataaataaataaattctataaatctgttttataaaaattaaaaattgattttaattaaaaaatcaaactttttaatatattatttttctcaacataaaattatttattatttttgttataaaatttgtttcatttttgaaaaacgtaaaaaaaagaagttattataagcaaaaaaaacatttcctagctaaaaacttcattcttttttgtttctccttaaactaatactgaaaattttaaattttcatcatatgtcactagtttccatgttttcaaatatattaatagaggagttgggtaacttttattaaataagttatgaatgagttaaaaatttcaaatatattttgggcttaattaagtttttaatctatcaaattaggagtatgtttattttagttctccaaataaaaatttacattttttagtctctccaattaaaaaaaaattactattattagtcctctcttcaaataaaaattgcatgttttaagatctctcaaattattgcacagcgactaaaaaaaatattttatttatttattttgagggacttaaaaatacaaaaaattatttgggagactaaaaaaataaaaccctaatttaagggactaaaaatataattaaacctataattttaataaattgtaaataaccaaattattattattattattattattattattattattattattcattataattcaatccctctatttaatacgcctgagaacaggaatatgtcaaggataaatgaaggaggaaaaatggaaaatgaattttttgaatagtagaattaatgtttatggaaaacttagatgattattattgtggctaataaacttattacacatgatgatgatttataattaaaaaaacaatataaaaatctttacattatgaatgtgcatcttttctcttataatgataaaaggataataccaaattttatatatatatatatatatatatatatatatatatatatatatatataaagggatatttccttttcgtgtattcattttatttgacatttttggtcctaaattaatcacaaaattattacctattatctttgcattgcaaccgctcatgtaatcaactattactatcttaggttgtgaaacaaaattgtcatgccacaaccccagaatcagccatgcgtatgtgataaaagaagaattgctcacatacaatttaatagttatttcaatttcactcatcatgaactatatttccttacttctacttaattttattccttgattttgttttcacctttgcaccattctcgatcataatcttcctactaactcatcccttcaccctttgaatattgaatttgcctattagtagtatcgttgtttgcagccaactagatcctcaacataatttgcagacataaacattctttgtttatcaattatatgtgagaaatcatcttaccctttcacttaagcaatttgcttcaatactattttatattttcaacctcccttttctataccaagtgaatagaaaacctctttttttggttaatttttttaatgttgcaggaaccaattttgcttatctttttgaatggttaacacatgaaattttgtttatcatggttccatgcagtgttaggtatctcatctaatcacattcaatctttttattttcatcttttaatttgtttttaatttattatcacttccttcttaatttatattcgggttctttgtttagcctttggatgtgagatttttttacatgatatgatacaattgcttttaattgtttatatatccattttaattttttctagtattttatgtgttgtacttgtcaaaatatggaagtaatacacgtcagggtggaaaaggcaaaggtgggctcaaaatcttgcatgtcgaatagtgaatgagccttgttaagaggatggacttgcaaaacaaaggagaggactgtgacgctcaaataagtacatcaatcatatgacaataatgtataagaatatgtatcggagtgtgtctgagcttcagtgtgaataactgagtgtgtggatgaatgtgtcaatgagtgtacggttgttcaagtgtccatgaatgagtgcagagattagatgcctctcggtgtaaattggcggtctcaagggttagacgaaacctggtatttataatgtaagaaggagcctctagttcttgtatgcggggttgttacagtggtgtaacaacccttaaaaataattattatcctataaataatgactaacaaataattgcaggttgtagataattaggtttacaaataatgtgtaccttgtagataattaggtttcttctatttgataaggaggttgtaacattatcaataacatttgaataataaggcattaaagataacccattaggcataacaacccaactgctaagaggaaacgtctgtgctcctatagcagggatgacatgaagggtggacacgtgtactggagcacaacataagtggtcacatgtatttggtagatcccaaacagtacataagccctcaagctttgagccagcttgcaggcaaaagagattgtcttgtgtcgagggagattgtccgatgttgatggagattgtctagtggcaagggtagtagccttgacaagtaagagggttgtgagcttgtcgatccccctgagtgtggacaaatgtgtcgatggtgataacctcgatagatgtggttttgtcaagcttctaaatcccggacaagtgttgtccgggttactgttatcaagtcgtccagggaggatataatatttgttgtgccatgagttatacatatcaggcaagtgaagtatccatgtttgacaactctgcccttttctggccgttggacaatgcattgaaggcaagtgtttcacttgttctttgccacaagcgcggggagcatacgcatagtactcttgcatatgtgtcactcgtggagtgggcatgtactataaacgtgggtagtgggtgagtggagctgtatcgtggcacaaatttcaagggagtcatttcaactcccgccagtaaccgaaaagtcacgcctcattaaaatggagtggacgtttgatgtttctatcacctccattcttgcctttcaaactttctcccttttggattcttctatattccttattttcctctttccttccatcgtctttccttttcaaggtatttctttaatcatgtctttgtctcccatctctgattccaccctgggtctaggtggtagtgattttgggggttcgatccaacaacccctagtggatcataaagtcatctatattagcaactctccgaaagagaaaaatagtcatgcgacctctgacagcgagtcctcctcttcagggaggacggcgaactcgtgccattatggggaaggttcttcccgtcttcgcaagagggtgcggcctcttgtttgtcgtcgagacgcagaacccattctgattaccaccatccttccctcgtctgcttcagggggagcgaggaaaagtggtggaggggatcactactagaaatattagatttaacatcgttacgttaacatcggtttttgaaggtttttttcaaaaatcaatgttaacgaaaatacagtggcaattttgtaattaacaggatacgattaacatcagttttcttaaaagcagatgttaacatgttcttgttaacatcggtttttcgaaaactgatgttaacgtgtcactgttaacatcaatttttaaccttttgaagaaaaacagatgttgttgttgttattatgaaagacatctggcccccaaattaaacacccttccttcactttcgtgcgcgccttcaacaactacaaaaacttcatctccctctctcacttgcaattttgcagatggtaacttgttcttccaccttctacttcactctctgtcacttgcacttgaagcgtacctcgcgacctcatggctttgtctcttgatcctcggttagtaggtttcttgcacccaatgaatgtgttaatgtctgaacatgtggcaactatctctgtttttgcattagcatttgaaggtcaatgtatcgatgtttatatgaatgtgtgtttggtatgtgctttcaatgttcttgctcactaagttgttgataaaatgcctatatgaaacttaataatgtgggcgaaggtatatatgttggtcagtaatccatcctcctggaatctgttaccattattttattttatagtattgagtgactatgccattcttgagtcttagcatgtttgatttatggtataaaacaaccacgtgttttagtcgtgcttgtttgaagctaggcctttgtatttggaatattaattaaggttggaatgtattctggttgttgtgtgttgtaattgtttggtaccactcacgggttgtgtgttgtaattgtttggtacctcttatagagagactgattcaaatttatttgattatatcctacttttggtacctctggtactcttaatatattttgcctatttaaaaaaacaacggaaagtataaacactataatgccatattgttcaagcaggctgtcttggtctcttactttcctatcaccgttgctgctacctcttacacccattaatactttaacattttttttggaactttggggtgcattgtggtaacttgttttaattactgttcttttcatttttcagttttgacaataactcatttagcttagaaacttcaatggtgtcagtatgcatgccattgcacaaacacgtagccattgactgcaattctttctcattgtttgaagggattgattaacacgtttccatgatgattcatcaccacatggccaccatttgaccttcaacaacacatcttttcttatacaaactaactaacaaaacattttttaatagtgcactactaacatttccatctatgttgctatgggtcagattaggctattctttaaagctgacctataccatttttaataccctgctagtcaattgctttctgattatggttttgctatgggtcaagaattttggtttatttatgtttgacaaagtaattaggctattctttgaagctgatctggacatttttctatttttaagctgatatggacctaccttaggtcactctcatggcgcttgcactgttggtgtcgttctcggaggtggttctctcgcttgcaacttccgacggctcccacaaggttagcaacttccattgactttgttatcagcctatatattcatttctaaccataggattagttgtctatgaagcttttaatgactaagtcttgttatcagcctaattgtcacacaaggttgtgcactgtaccttaagtaagctaagcaatcttgcatatgaaatctgaaatgaggcaggttacaaattgtgatcacatgatcaccacttgtactgagtacttaggtttagctacaggggtggtgttagtgtttgcctataaggactgaatagataagttgccaggttatctcaatgtagagcaggatgtaatttactcacttgattcactaaacttattgattgaaagtgatacatgagttgcctttgtatacgcaagtaaatataataaagtaagaaacacttaatggcttagtaaatatgaaagtcactgaagccaaattgtgtccaattagtgttgtggtgcagcaaaattacgtatagaaccactgcatagaaagcggcgcacattctccaaacaattattagccacctttagttacaaatgagtcactctcatcatatcgtatattcatatttcgtattcatatttgttggcaacacttcctttcatattcccacattctgctactaattaatagcttgctttaggccaatcatgtgaattcgacacaaatgattggttggaatggtttgtgtgtaattggttttggagagagacacatttcatatttaattttttattctgactaatcactagttgtaattgtaatttgtagacacttttcattttcatttttgcatcatcatcacaacattcattgttgttgttagccaccatcttcataggtaggaacatctttcataaattgagcaaatttgtgtgtgtgtatcgtctttgaatataacatgttcaatgttcaacatcatttataggcagttgtcctttttcatcactagattcgtgcttgtagattgtcagtgaccatcatcataggtacttacgaatgtcttttgtattttttgagattctatatgtatttggtggttttgtaacttgttttatgtgattaattactagtgctttatatatacaatcaattttcattatgagtgaaccttaatttcccgtttgagatttattacagtgattctttcggacagtttggattaatcgttgtattaattcttgaattgtccgtttggacaatttggtcatatttttacagtatattcatatgcatatgttgagtttcttttcttaaatttgagaaatttcggtacaatgcatttcactttgttctccaggtgcatccttgactgtggtgaaactcatgtcaccgctttcatgttgtgtactcgaagatcaaagtgaaatgctgccgaaatttcgtcaaatttaaaataagaaactcaacctatacatatgaacatactataaaaatatgtcttcctgaatgggatagggccacacctttaatgaaaaacgtgaggtttcatgcatggaataactttgtgagtatcacagagttattaattaaatggatcgaagttggatgaatgtaagtcgcatcacggttgagtataaggaaggtgtaacgccccaactaaagctggggtcattaacctgtcttaattactatcatcaacaaataatcatcagagtttaagcagttcggaagcataagaataaggatgacatcatcaattgtcactaacatagccattatacattataatatggtgaatatacataacgtctgtgtctaagtacaaaactgtacatatatatatcttccttcaggttacaaaactagccaaagacagagtacaaaacatcagagccacatgctcatgttatctagcctaaggtttacaaatcctaactatccctgcataggctttttgccttaggatctatctgctcctcctgaggtatcacctgcaaaatataagccccacaaagggtgagatataaaatcccagtaaactcagggcccttgaaggtatttccttcccctggttcacttcaaacatatacatgaaatagcatatccaaaccaaccactcatgaatccaatatcagaacatcattctcacaatcattaatcaatcaggaaatctcaaatcacctccacctgtcaatactcaggtgacccaagcatggctcacaaccgttcatagcataaaccactacctgcagaggctacatctaggcatataggaacatctcctattaagaggctacatctatatcctaggaacatctcatggcaggtctccatcactatcctgcagaggctacatctaggcatataggaacatctccaagtaagaggctacatctatatcctaagaacatctcttgccaggatctcattagtctatatgaggctacatctgtatatataggaacatctccaattaggaggctacatctatataacaggaacatctcatattctatctccacacaattacctgaggaggctacatctgtatacataggaacatctcccatatgaggctacatctatataacaggaacatcttacatcaggtcttactcaatctcatgtcatctatcctactaccataggattccattcatttccagaattcacagtaaatctaataatcaaccacgcctttcacaggctaaacagctcataatcatacatatcaagctcatactacaatttcacattccattccaagcatctaaaatcaatacatatcattcccccatcacaagatgcaaatcacattctcagcatctcaaagccatacacatccattcaacaatcaatcacacaatatacaatttccatatacatgtaggtattcacaacggaaccatcactccatcaagagcatggtggaacacagcaaaggacacacatacaagaaccaagagcttacctgctctaagcaaaacaccggtttcccaggtctcgtggccaccaccaccagaaatatcaagctcacgtcctacataagcaaacacataacgtatcaataatggtcctaagtcgttagaacgaaaggaactataatcctttccacaagacatataactaatcactttacaagtgattctcagaccctcaacgggatccctctcagcctaaccaaggctccagagcctcttctaagactctgctcaaggtaataaaaccatgtctttactttagccttatcaaaaccaagcttatactccaaaccatttcagctcataaacgacatctatactatccaaagagtaactttatcatctactctaaggttcacaatagccataccttcagccctttctctatgcatgtatagctcagagccaaaatcaaacttcatcaataatgatttctgaaggctctaagttcatcaaaacaatcccctgagcacaattctctacaggaccctgggctaattctaaccccatcacatatgggtcattgttcatgcaaaacccccaaaatcaaaatcaaacagagaaacttgagtttcttacctcaatggcgacaaagaagacccaaggacaacctcctcgagctctggtgtcctttccacgcaatgggtctcagccactctcaagttctctgaacttttctttggagattccaaaactcactcaaaaggggtttttcaagagaaaggatgaatgattcaagcttctcaaatgtttctctcacaagaataggccataagaaggtgttttggtcaagttatgactctagaaagcttggggatgtcaacaatggaggtccagggcagaaggaagaagaagagcctttttcccttcagttttcgtgttttgggctttaaatagaagccctgcccgacctgtagcgctcttagcgccagcctggcccccccaacgccacattccagaacctccggcgccatcagcgccacatctggcgccatccgcgccagctggaaaacttggcgcccatggcgccacatctggcgctccaagcgcgaactgtaacgcctctcataactctcttgtgcttgattgattttaattaaaaactcatgtccactttgtattaaatgatcttagttgtaactttttcgcgaaaattcgttttgccttgcttgttttgtgattcgtaaatggcgtaaacgattttcctcaccacgatttatttataataagaatacagtccatgatacagtccactatacagttcataatacagtccatgatacatgtccaataatatacagacaatccaaaatacatatgaaccacaagcatcacaacatcgacatcacatcttccaatcatccatgcacatcttcattccatcatccatgctcagctactactgttcctctgtgcgcccaaatgaattggggtcatcacaggtgtcaaccacagacacaactcagataagtttatgccaaacgtagtttgaataatataaacgcagatagataaaatctacacagcttatacagtgtacagatcaccatacatatacccagtgtgcgatgtataacatgcatgcttgtctttttatatgatgcatgactgagatctcagaggcctaatacaaggtaccaaaatcagaatagtttcacccactccagtgaaacagtcccacccactccagtgagacctccctccactctgaggggataaaagggtaccaatagttccacccactccagtgaaacagtcccacccactccagtgagacctccctccactccgaggggaataaatgcgaatgatgtatgtaatggtttccttttattttccagttaccctttatcattactttaattctcaaattctcatattagataattccactcactccagtggaacacgtctcaaagctcagcatacagccatagttcaatatcatcaacatagtacacatctttatttatcatcatcaaactcataaaatcacttaaaattcatatagattcatgaagcaccaattaacatattattcttaccaagatctataaaatcactcaacaacccataagctttgtaaaatcatatacaaccacacaggttccaccatatcacacacttttatttctttgaagtgttttatcaaacacttggtgtgcggttatgaaaacactcaacaacacatgtaaaaacacatagttatttctttaaaacattcaatcatgcaaatacactacatatccaacaataaaggttcaaatccacaacacttaaacatcttttattctttgtgacaaactatcaaacacatggtgtgcaatatagaatatttgtaaaagaaagctacttaacatcactttccacatcctagacatatttccaacaaatttataacatcaaattaaacatagatacttaaggaatcatgatcataatttcggctaacatcaatatatgtcaacatattttatttaacaactatagctttaaacgattagtttcttaaagacaactatactacttctattttcggttaattcctactttgattcatggaattaagttcaatttatttatccattaattatttgttagactagaatcaagttacttagctaaacaattattcaaactctttgagacattttatcgaacatcttgtctacaaacatcatgaaataaagcaaggaacattattcaaactaggctcaacataaactctccataccttggtttcctaagctttttggacagccttccttatttaaacttgaagaatccttgctcctaaagtggctaatcttcacatggacttctaggattaggctttgtgttttgtgttctaggtaaagaatagtattaagatgaaaggaaatggacaagcttttgggatggatatttgcacgatttaggctctcttaggacagcccacaatttcagttttgcatctccttttataggctaagttatttggcttttctacaaaaatcttcaaaacttatgattacatagctttttggttggttttctcttattggctaacactttctcaccctacaagtgtccttgttcatgagagttccacaccattccacctccttctaatatttgcacgtgaaattgcttggtcttggtgcatttcttttggtttcattcaaatccgtgggtagcttagtcataaaatttctgcccaaaacccgtgttacaaaaatattgattctgaacttgttaaccgttggatcttcttaaaatattaatggtatactcctaacttacatatctaacttttgaccgttgggatcttttaaataaggcctagaaatgtctacgttttctgcccaaggaaacaaaataaaatttgcttcaaatatcttttaagcatttataactagctttccatttggactaatagcaagttcctaagcctcttaaacatccatgtgtccattcttgaagtttcttagagcttttcttcattgatcttgcatcataccgccaaagcttgtattaggaattctaatcaaccaatttttccttcaattacatgtaataactttacttgaattcttattggtctattttgcttttgaattattaaaattactaaactaactcattgaagaaaccttttccttccataattaagagaaaactctatagattatgtccatcctcttcttataattttttgatacctgaggttgtctagattaagctcttttcaacctatcttccaaaattcgtagaaattctattttagggttttctgccctcaaccttgctgataagttgtcatctaagagtattttatcctatgctcaggttcctattaatttctaaggtcatcttggtcagttttgacctaggagtattttggtaatttcactactcactctaggggcaaaattgtcattttcaaaaaatgttcaggatatctctataattgttactctaagggtatctttggtcatttccaaaacatctaaggatatttataacatttcttccttaaaatgtcttactggacttcctagggcaatttggtcattaataaaatatttaggggtattttggtcatttattgcctcagggacctaactgtcattctcgaaattgtccaaggatattttggtaatttctcctagtaaatatcttactaaaatatctagggatacattggtcatttctagaattgttcagggcaaaattgtcattctcaccctagggacataaacgtcatttctgaaattgtttaggggcgttcttgtcattttgtcctaaatttttctactgcctttcattaacattttactcttagtagttgtctataattccctaaattttggagtgttatatgaacctctagagactctgcgctcccagcgcgaacctggcgctcctaacgccacattccagtgctccggcgccatcacgccgcaacccttacaaggttttctgctaagtgctcccttttgagcaaactaaagcatgattatataccttaatcacagggcttaaaattcaaggtcttacagaaggcgttgaattgtttgaatgggagacgccaagcattagacgacataccgaaacatcttcttgaaaaaattaagaatatttcacaataaccaagaggggggtgaattggttaaaaccttgatattttaaaatcaaattcaaataagagtttcagaatctttatcactttcaaaaccaagaaatcaatttactcaatcaaatgtctcagctcaagaatccaatagatcaaaaactaagcttgttgaacaatgaatatgaatcaattaattaaatatcaatgaattagatgagaataaaaacatagaatcaacgcacaaacaatttatactggttcacttcaaaacttgaaactacatccagcttcttccaaccaacattaggttagagttccactattataaaatttctagttcttacatgtaattacaacatctcccctttatcaaccctagataaagatcagaaatctaaaacactattagattctaagagacaaagaaccagagaacactactctgttctttacactagagaacccttctctagattcaagcaagaacccactttacgatagcaatcttacacagaaattcagaacgaaatttacacacaacaattaaggagaaagataacctgatgatccaatgaatgaatgcatatgaattaccaaatcaggttgagaagaaatcaaactcagaacatacttctccttaatcttgaaaacaatcttgcttaagaatcattcaaagacccattgatgtttttgaatgaagcaagtaaaaacacttagaaaatcacttaggaataacttgagaggcttgtgtatactcagaattatcaagttgtaaaataagctcagcctctattactatttataacagaatttgtaactaactgtaatcgattaaacgcgcctaagaatcaattatttttcttatgtaaccaattataatagctctgtaattgattgatccgttcaaaaaatgattctgggatttgcaacgagcaaaataatcgattatcccgagctgtaatcgattaaaatagaagttctaaaagttacaaattacactatgtaatcaattataatcttcaaagcatccaagcatgttgaaagcccaaaaccaaagcttaaatcatattcttccattcttcatgatgctccacctatatccaacaatctccccctttctggctttgaacatgccaaattcttgattgattaaatgttggacttgaagttaattgagggaatcaattttgaaaaacattgagctttgcaaacctgcaaataattttaactcttttgccaagaacaagtgttaaagaattcgttgtttgatccatcattaatctacatttatatcttatttaattggttagtttttaacacttagctcccccttaatttgtcaatccattcaatttaagatttggacaaaaaacgtgcagtaaaacagggtagaacagagtatgatgcagagcactaccaaatcgaccaaatcaatcaatttctccccctatttggcttatcaaagtcaaaattatgtaaagcacaatggataatgcaaggagaaacagaaattggatatattaaacataaagggaaccaagtacaaagcttaaaaaaaatgacaataaaagcataaaaaaaacagaaaaagtacaaagtctaaaaagattcagactcatcaaacataagggttgcttcaatatcatctagcctattcttaatgccttctaaagctaaatttgtttcagccctaaaatcatggtgcattgtaatcaggccatccatcttctgaagcatgagggattcaaactgggtgtagatgggttgagtagcatcttcttcttcttcagcaacctcttcttgaacaccaccagcagcagaatgttcaggcactagttgtggaccagccatttgccacccttgtggtgtcttcaccatactaagcttgttgagatgcttgtcctttatgaggctgttgctagaattagtgttgtccactacttcatttgacacatcaatatgaaagtagtctatgaacctggacacaagaacaacatatggaaatgggtagttgacaagccttttagattttaacataatttcctcaagaatgagaatccaattcatctgaattgaattcttcagaccatacactagttgtaggtcctcatcagttgcttgggcatggtttgtggctctaggggtgaggatatatgtgattatataatgcagtagcctatcctcatgggtcataggtccagttcctagcctagttttcaatctcatgttgggatcactaagcatgtccctatatgtgtcaacctattgtagccctcaggattttcatcaaacttcctttctccttcaaaaaagatgccagccactgcctcccacacctcatgggttatctccatgggcactccattgacttgagacctcagtgtcccgtccatggatcccttggcacaggtgtagaacaccttgaccaattcagggtagaaagtaccctttaactcaacaagttttttaagaccctgggtttctaagaaggcagggaattgaaagccttccctaataaaccaatcaatctctaagtatttgggaggatagacctgtttggttgcattgaattgaagataggtcatattggtctttctcattgttaaaccaaaggtcaagactatttgatggagaggggtttgaggattttcttactcttctcttaggattctcattctcttagaggtagacatactaacagggattctaagcacagaaaaaatagaggtttagagagagaaaagatagagattggtgtgattttgtcatggagcaaaggttctatttatagaggattttaggctccaagcttttgaaatttgaataaactagctgttagaacgtattaaatcactgcagatggtttaaatttgaattggtgggagttgggcagtttcaacttccaagagaatctatcagattttgcagtaactcctcaaataatcgattatagtccttgtgtaatcgattatttcatgtgcagaaacacaaatagaacacacagtaatcgattattcttgtacagtaattgattattttgcaaccatttagaggttgaagacaatgtgtaatcgattatttcatgttttaatcaattatcacagagagttttaaatttcagaaacaaaatttagcttgtgtaatcgattattccaaaagttattgattttttattttcaacattttaatcgattaccattcactataatcgattattccagaaaagacttaattctcagaattgacaaataatcgattataatggtagtgtaatcgattacataagctcaactgtcactctaaatgaggattttaatgattataatcgattaatctgacacttaatcgattattatagagcttttatcagaaatagaaaaatttatgcagcattacatagaatttctacgtttttgtgatgagggattcaatgtacattgtaattcactttaaaaggtatataacaaagtatcaacacaatcactctaagagagattagattcatccaagattcctagcatgtttctaagagcatagaatctatctctagctaatggttttgtagagatatcagccaattgattattagtgtcaatgaaatcaattttgatattacctctttgaacatgatctctgagaaaatgatgccttatctcaatgtgcttggtccttgaatgcattattggattctgagatgttaatggcacttgtgttgtcacatagcaaaggtatttgtttcagttcaactccaaagtcttgcatttgttgcttcaaccataggctttgtgcacaacaacttccagctgagatatattcagcttcagcagttgacaaagcaacacaagattgtttcttgcaatgccatgagattaatgaacttccaagaagatgacaagtgtcacttgtgctttttctatctaacttgcaacctgcaaagtcagaatcagaatatccaataatattaattgaagcacctttgggataccaaagaccaacttttggtgtagccgtgagatatttgaggatccttttgactgctgtaaggtgagactctttgggattttcttgatatcttgcacacaagcaaacactaagcattatatcaagtctaccaactgtcaaatataacaatgatccaatcatttctctgaattttgactcatcaaccttctttccactttcatctgaatcaagataggttgaggttgccataggagttgcagcatctttacttttatccatttcaaactttttgatcacttcaaggcaatattttgattgattgagaaatgttccattcttcatttgcttcacttgaagaccaagaaagaatgttctcccatcattgacatttcaaattccttttgcatagatgcagagaattccttgcaaagcacatggttagtttaaccaaagattatatcaccaacataaacttgaaccaataagatatcattcttatgccttttgatgaacaaggttttgtcaacatggccccttgtgaaagattgttcaagcaaaaacttgcttagtctttcataccatgatcttggagcttgcttcaaaccataaaagggcctttttgagtttaaaaacatagtttggatgtataaaatcagtaaaaccaggaggttgttcaacatatatatcctcctcaatgtatccatttaaaaaggcacttttaacatccatttgaaagagtttgaaatccattaaacatgcataagcaagcaataacctatggcttccaatcttgcaactggagcatatgtctcctcatagtctatgccttcttcttggttgtaatctttagcaaccaatctagtttatttctgactatgattccacttttatcaagtttatttctaaaaacccattttgtaccaataggtttgagagaggatggtctaggaacaagtttccaaacttcatttctcttaaactgatttaactcatcatgcatggcatgcatccaatgttcatcatgtaaggcttgatcaatattcttaggttcaatttgagaaacaaaagtcatattacaacataggtttcttaatgaagatctagtagatgttccctttgaaacttcacctattatgttgtcaagtgagagatctcttgttattctccaatctttaggctcttgaacaggagttgatggttttatttcagcacttggttcttctttctctttaattatagaatcatttagctgaataaattcttccattggacctgcatctacattacacttcttttcctctttagaggaattagactcatcacaaatcacatgtatagattcttccatgcacattgttcttttgttgaatactctgtaagctttactatataatgaatatccaaggaaaattgcttcatcagccttagcatcaaattttccaagtgattcttttccattgtttaatacaaaacacttgcagccaaaagctctcaaatgagaaatgttggattttctacctttgtatatttcataaggagttttctttaaaatgggctttataagtaatctaatcaaagtgtagcatactgtacttacagcatcagcccaaaaatattttggcaaatttatctcattaagaagagttattgctccctcttcaagagatctatttttcctctccacaacaccattttgttgaggtattcttggagctcaaaaattgtggttaattccattttcttcataaaatttttcaaaatgttcattttggaattctccaccatgatcacttcttattgagataattttgctgcccttttcattttgtgcaagcttggccatttttctaaaagcaaggaaagcatcacttttggatttcaaaaacagagtccaagtgaaactagagtaatcatctacaatgacaagcccataataattgccacctaaactcattgttctagaaggaccaaacaaatcaatgtgcagtaattcaagcgatctagaggtagaaacaatgtttttactttgaaaagagtttttagtttgtttccccttttgacaagcatcacaaagtttgtccttttcaaacttgagtttgggcaaaccaattactaaatcttttctaataagcttattcatgtgatgcatgtttatgtgactagcccttctatacgatagccaagattcatcaatcttgcttataagacaagaagtgttgtggaagaatgcatgatcaattgaaagtaagtaaatgttacctttccttttacctatatgaatcacttcactacttttcccatcacaaatcatgcagcaattctcattgaatgagattttgaatcctttgtcacagagttggcttatgcttaagagattgtgcttcaaaccttctacataaagaacattttttatctttgttttgaagttatctccaatgttgtcttctccaatgatctttcctttattattatccccaaaagtgacatatcctccatctttaagagttaaatttgtaagcatcgacatgtttcctgtcatatgtctagagcatccactgtcaaggtaccatgttgaggatctagctctaagacatacctgcaaaaatcaaatcagtttataaaggaaggtacccaattgaggttgggtctataggggttagcatttttctttttctttggaatccaaatacaatctccatttggcacatagaatctcctagcatagcatttgtatgatgtgtgtcctttctccatacaatagttgcaaatgatagattttgatggttttctacaggatgcattttgattgatcttggagtttttaaaccactttgaattcttctgttttagaggcacaaatacagtttttccaaatgattttgagccttgtttgtaccccaaatagaagtatctccagcatacttttgcacacttaacatttcagccaagttgcattttcctttgtaaagtgatgagtcactatttatcactatttactcatctttatgtactcattttaatccctaacttgtgcttaattgtttatattttgcattgtttctcatttaggatttaattggaccaataattcagattttaattaatttggattattttaagtttaattattctaaattgattttcagggcagattaataattaaatgggcttggaattaattcatgaacttgaagattgggatgccgcgtcatcattattttccgcatcagcttggaattttcgttttattttattttattttcgttttgggccaaaattgttaggaaaagcccattttcgttttaggtcagtcactatatatttgggaactgtgcccatgcagagaaggagccaattttcattttgttttctttaggatccaattttcgttcttttttctttaggagccaattttcgttctgttttctttagcagccaattttcgttctgttttctttagcagccaatactatttcgttttagggtttttagaatatttttgttttctgctttctctgttctgttttcgttttctattttctgaatacattcgcgtttcaattcagttttattttcattttgtctgtttcatcttcatcttctaatttcgtttttgctctctgtttcagctatttcgttttagctttaggtttttcgtttctgtttaatttcgtttctgcttttaatttcgtttaatgtttcgtttcaattcaatttacgtttctgtcgttaatttcgaatttatggaaggctaaatcctagggttggaccctaggacagattgcagaccttcaatggaggttctctatgtgcaattcgtattctgcttgttcttccttgtttgggtttctgttctgcatttttcgaattaggatcatgcttaatgattctgagttgattgattcagtaatctcaggttgcttaatcctgagtgcttgccctaacgaggttcacgtttgcttaattcgtgtaatgacgttttaggttaatctttgcttagttgattaatttggactgatgagaattaagcaggacagattatctttcgtgaaccaaggatattagaggcgcaatctgttctaaggtctgacttgtttttaatcactgcaattaattgttaatttctgttttaatttagttttcgcattctgccaaaaaaaatccccccaaaacacgttttcaatccctaacgcagataattgagatccttgagagacgacctaggagtcacttcctagtactacatttaaaactgaattaatttggttacgtacgaccgcgatcaaattttggtgccgttgccggggatcatcagtctgtttaagggttctggtgtgtgtgtgtatgtgttttctgttttgtttgtgtttgtgttagtgttgtttttgctttgtgttctgtgatcattgttcattgttgcaagtggtagagaagcaaagtagcattcgagttaagctgagaatttcactctgatcactaatggaacagtaactcgaattgtgctttgttctgttgcctatattagttcatatatcagttctgatttttaggtgtggtttgctataattgtgctttgggtcttttgtttcttgcatatttggttgtgttgatcaattatgcaggtccaattgatgcattgagcaagcaattcgtggaacaacagcatgcagcagccagcagcaatggaacaatgacatgaacagtaaccagtttttctgaattacttgtgaatttttgttttgatagttagacttgttatttttgcttcaatttttgtgcggtaacttcttttagcttatatttgtgtggaaaaataccaaaagcacttaaagtattccagattctgaagggcaaaaattttggatttcaatttttgtggaaacttcaaactgccataacttttgatccgaccatcagaattggacatattatatatgcttttggggtagaaaaaaaagatctagccaacccagcacgctattcttgctggccaccattggattttcaaaaagaggccgttttctattttatttttatttttcaagttttattttcctatttttctatattttcttaatctgttttatttagttatcctttgaattaggttttgaaatttggtgtgctgtcttttcatgattttaaggtgttgctcacaaaattttagctcatttggacttcgtttgagtatagctctagttttacctctctttgtgcttgtctgccaaatgcttgatatgttgcatgtagtgcatgactagaggcaatccaggagatcttcaaccctttgatcctgagatagataggacctaccatagattagttaggcattctaggaaattttcattagattctgtaactttagatagtgttagcttgaattctgagtattctccttctgagcattctaccagcttcaattctgtgcatactatttctgattctgctgattatactgagaataacatggctcaacctccacctcgtgagaggactctcagggagctggctgcacctgattttacctatgagagcttgtgcattcagtatcctgatgaggatgtcccatatgttctcaaaactggactaatacatttgctgcctaagtttcatggtcatgcaggagagtgtcctcataagcatctgaaggaattccatatagtctgttcaacaatgaaacctccagatgtccctgaagatcacattttcctgaaggcattcccacattcattggagggagtggcaaaggacttgctatactacctagctcccaggtctatcactggttgggatgaccttaagaaaatgtttctggaaaaaattttccctgcatctaggacactgccatcaggaaggatatttctgggatcaggcagcttggtggagaaatcctgtatgagtactgggagagatttaaaaagttgtgtgcaagctgtccacaccatcagatttctgagcagcttcttctccaatatttttatgaaggacttaacagcatggagaggagtatgattgatgctgccagtgatggagcacttggtgatataacccctgcagaagctaggcatttgatagagaagatggcttctaactctcagtagttcagtgcaaggaatgatgctattgttattcgtggagttcatgatgtagctgctaattcttcttcatctgcagctacgaaattagagggcaaattagatgctttggtgaacttagtcactcagcttgctgttaaccagaagtttgcctcagttgccagagtttgtggtgtctgcacttccaatgatcactatactgatgcatgtccttctctgcagcaccctgttagccctgatgctcctcaagcttattctgcaaacatctataacaataggcctcaacaacaacagcagcagaattatgatctgtccagcaacagatataatccagggtggagaaatcatcctaacctcagatggtcaaacaaccagcaacatcaacagcctccactacagcaacatcaacagcctccactaccaccatttcaaggttctgctggcccaaccagaccttatgtgcctccaccaatccaacagcagcagtaccagaggcaacaaaatgatgtacttgttccaccagcacctcaaccttctacttctgaaccttcactggaggagctagtgagacagatgatccttcaaaatttacaattccagcaagagaccagagcttccatccagagtctgaccaatcagatggggcagatggccactcaactgaatcaggcgcagtcacaaaattcagatagactaccttctcaggctgtgcagaatccgaaaaatgtgagtgccatcacattgaggtcgggaaaacagattgacatacctgctgcagtgtccccacctctatctgtactagttcctacccctgcacctgtaccaataattgagcaaaatgaagatccaactggtactggaaaaattcatgcaggtggaccttcttccagcaccagttctgatgtgcagcaacaacagcttcccatccctcttccatttcctcctaggtcaattccaaacaaaaagatggaagaggtggataaggaaatattggagatcttcaagaaagtagaggtcaacatacctctgctcgatgccataaagcacactccgaaatatgcaaaattcttgaaggagctgtgcactaataagaggaagaggaagatgactggaattgagagagtcagcatgggcagaaatgtatcttctatgacaggtaattctgttccaaacatgcctgaaaaatgtgaggacccaggtacttttagcataccatgtattattggtaataataaatttgataaagccatgcttgatttaggtgcctccataaatgttatgcctctgtccatttttaaatctatgtcccttggtcccttgcaacctactggtgtagtgatacagttggcaaatagaagtgttgcctaccctacaggtttcattgaggatgtcttagttagggttggtgaattgatttttcctgctgatttctatgtgcttgatatggaggagggattctcccatggttctgtccccctcattttaggcagaccatttatgaaaacagcccgaactaagattgatgtgtatgctggtacattgactatggagtttggtgatattgtttttcattttaacattcttgatgccatgaaacatctatctgaaaatcattctgtcttccgtgctgagattcttgatgatgttgttgatgagtatgtttctgatttttattcttcccatgatacaaagcaatgttttctatctgatctttatacttctcttgcatgcatggaatctgaacatgaatctgacaatgaatccagctttgattttcaatctgaacatatgtcccattttgatgttagttctgagattaattctgatgtattgggtgttgtacctctgcatataaattctttagagtcagaatgtactaaccatgtttcaggaagtacacaagaatctgacttgcaggttgaggtacaggctgtggaacccattcttcttccatctctggttccttcttctgatcaacccacccccattccagaattaaaacctttaccggaaaacctcaagtatgcctacttggataatgatgagaggttgccagtgatcatttccacgtcccttgatgctgatcaagaggacaagctgttgcaagttctaaaaaagcataagaaagccatcggatggaccctggcagatatatctggtattagcccatccacttgtatgcatagaatatcattggaggatggagctaaacccgtgacacagccacagaggagactcaacccggtgattctggatgtagtaaagaaggaggtgaccaagcttcttcaggctgggatcatttatcctatctctgacagtcagtgggtgagtccagttcaggtagttccaaagaagacaggcctcactgttgtaaagaatgacaaggatgagcttatcccaaccagagtgcaaaacagttggagagtctgcattgattaccgaaggctgaaccaagcaacacagaaagatcattttccgctgccattcattgaccaaatgcttgagcgtctggcaagtaaatctcattactgttttcttgatggtttttctggttattttcaaatccatattgctcctgaggatcaggagaaaaccacattcacctgtccctttggcacttttgcctataggaggatgccttttggcctatgtaatgcccctggtactttccagcggtgcatgcttagcatattctctgattttcttgaaaattgcatagaggtgtttatggacgattttactatatatggatcctcttttgacatgtgtttagacagtttggataaagtgcttaatagatgcattgaaactaaccttgtcttgaattttgaaaaatgccatttcatggtagaacagggaatagttttagggcatgtcatttccagtaaaggtattgaggtagatcctgcaaaagtatttgttatttcacatctgccttacccctcttgcgagcgagaggttcgttcttttcttggtcatgcaggtttctataggcgttttatcagagatttcagcaagaaggcccttccgctatccaatctgctgcaaaaagatgtggatttcaattttgctgatagctgtaagaaggcgttcgatcaccttaaggaagcattgaccactactcctatcctccaggcacctgactggacagtcccatttgaattaatgtgtgatgcatccaattatgcattgggagctgtcctagcacagaaagttgataagctgcctagagtgatctattatgcttccaggactttggatgctgcccaagcaaactacaccacaactgagaaagagcttcttgccattgtgtttgctcttgataaatttagatcatatttgcttggttctcctattattgtttatactgaccatgcagctctaaagtacctgttgaaaaagactgattcaaagcctagactgatcagatggatgctcttgcttcaagaatttgatttggatatccgtgatcggagtggagctcagaatttggtagcagaccatctcagcagaattgaaggagctaagaataatgatgaggtgttacccatccaggataattttcctgatgaaaatcttgactgtttctgtttctaattccaccccctggtttgctaatattgtgaattacttagttgcttctgtttttcctcccttggcatcacgagctcaaattgataaattaaagagtgatgctaagcattatatttgggatgacccctatttgtggaagttgtgcagtgaccaggtgattaggagatgcataccggatcatgagattaattcagtcttgcagttctgtcattcctccgcaccaggtggccatatcggtatacagaggacagctcgcaaggttcttgattgtggtttatactggcctaccatcttcagagatgcggcaaagacttgtagcacttgtgagcagtgtcagagagcaggaggatcccttacatggagacaacagatgcctcagcaacccatgctattttgtgaggtgtttgatgtctggggtattgatttcatgggtcctttccctgcctcttttggtttctcatatattctattggctgttgattatgtttcaaaatgggtagaagccagagctactaggactaatgacgctcgggttgtggtagattttgttcgatctaacatattttgcaggtttggaatacccagagccatcattagtgatcaaggaactcatttttgcaacagatccatgcaagctttgctcaagaaatacggggttgtgcatcgaatctctacaccataccatccccaaaccaatgggcaagctgaaatttccaaccgagaaatcaagaggatcttagagaaagttgtccagcccaacagaaaggattagagtataagattggacgatgctctttgggctcataggactgcctacaaagcacccataggaatgtctccttatcgagttgtctttggtaaggcatgtcatctgcctgttgagattgagcatcgagcctattgggctgtgaagacatgcaacttttccatggatcaagttggtgaggaaaggaagttacaactaagtgaattagatgagatctgccttgaagcttatgagaactcaaagttctacaaagagaagaccaagaagttccatgatagcctgatagctaagaaagacttcgaggttggccagaaagttctcttgtacaattctagacttggactcatgggtggtaagttacggtcaaagtggattggaccttttgttgttactaatgtttatccttatggtacagttgaaatccaaagtgagtccacaggaaagagcttcaagatcaatggacaccgtcttaaaccattcctcagcaatccttccttgctggatgcagttgtggaggagatatctctgcttgaccctgactcccttccatcttccactacactttagggagttttctttatctttctcctcctttatttttatcgcacttgtccatctgaacttttgttgtgccacattggggacaatgtgtaattttaagtatggggggggagagactgtttctttttgtttttgttgttttgttttgtttgtttttgttatcctgtgtatagttttgcatgtttctttttgaattttgggttttgaataagtgttgacacctacttcatgcttagataagagttgcttcatactgtatggtttgaaatccatgtttttcttttcttggaaagatgattatgaagtttgaaagattgatttaactgtgacagatataccctgtgtgaggaattgagccactatctgttctttcatgtgtgctatacctcttgattgcttgcacagttgccttgtcttgaatctgtttgatatttcttggttctcatgcatgtttggatatgattaaggcatttttgttctgataagcctctggccaaataagcttaccctgaatttaatccctttgacaaccctgttgagcctaatttcctttcttttgtttgaagctcattacaagccttaagtgaaaaacaatgattaccttaaccttagggaattttggagctttggaattgttttgggaataagtaagggggttgcatgtatatattgttttggatgatatctctggcctgttggtttactctgatgtttagcttactcttcatatttctatgtatatatcagtaccataaaaaaaaatatagaaatgaaagaaaaaaaataataataaattgaagaaaagttgttgtgtttgaagcaaaggaaaaggaatggtattagaggttgattagagatttttgggtttgtttttggtgcttacttcttacttattccccattgctcctctagtccctctggtatgcagctacttatcccatattttatcctaccccatgtccttgaccacattacaaccctgaaaagaccttttgatccttatgtgcatgtttattgggtgttgattatatgtaacaccccggacgtctccggcatgttatcatcaatgatatacataacacgctatcggtgttaactaagcgcggtgcggaagcgatagaatcgtttatcttgattacattatgcatggaatataaaaccacacacagaaacctaaaacaagcccctgctgatccagatcaaacataaacaattatataggcagatgacagaaaacataactcagataatcaggaggaaacacacttatatacaatcatcatcatctgtacatatacatgctcaaaaacaagaccacagctgggtcatacattataatatgtacaggaaatggtatacacataccctacaactacacagagatctaagaccagcttcaactcttgaagctctgctctgatcttctactgcagcctcccatccagcctctcaggttcactagggcctcctgccctgaggtcgctcctctcctcaagaagcacctgaaaaccaccaaccccacacagggtgagacaaatgtctcagtaaactcagggttctgggaatcctccctaaccctggtttaccatcaagcgtaaacaaaacatataacagagctgaggaaaatcctcctagctcacacatacaaagactaggacaacatcctagctttcacacatcccagctctctgggtcataaacggatgctctcagcatcagaggtattcaacctcgtcctggctctctcagccatatcacagagaacaaagccataaccatggcatcaatgtctcatctaggctctcatagcctggctcacagacatctcacagagatacgtatcatcgtgtctctcattagacacttctcaacacaagagaggcaccgcctctgaaccacacaaacattgcctgaggagaaccctcaactcaggactctgaatcttgcaaacatggcctgaggagaaccctcaactcaggactctgtaaatccagatatggctcatctaagaggccttaggctctagtccccctcgggaagccctctcttagagatacaacatatctgtctagcatctggcctgggaaaccctccaggactttcatgacacatgcctgggcaagaacatccatatagggcaatcacctccaggacttttgtacacactggcctgggaaagaacctcttttacagggcaatcacctccaggactttcacaaagactggcctgaggataatcactcaggactttcaacaactgtgcctaaggaggaacatccacacagttccttctgaccttaggacttaagtggagagccgtggcacctcccaaggaatctcagctattccagggagtcctcaaactctacctctggctagggaacctcagctagcctgatactcatccagtatcctctaggttccatcacagaccatctcatgatctgcattctctcaaaaggctcacggcctcacacctgccacatcaggtgtctcataaccctcacactgtttcagtggctatcctagggttcatcatatattcatctttctagaacggactgagttccactctaagtaccgttcttcagcctttcaggcttcccacccctagaatatcaataacaggccacctaggccttcctttcaattgcatgcataaacatatatataatcaaacatagcatgcaatcttcaccctacttggatgccaaaccaaaataagggaaaactccagaaagatgagcttacctggctagccgtacctcacagctctagcctccgctgatggtctgctcctctgacaccctctgtgtcaagccctaccaaggcatacaagcacacatcacagaccattcaagcatataaacatgcacaagctcatcaagcagacatccactgcctccgggaaaggaaacacagtccttcccatcaacctgagcatctactctaaggttcatcaggctcatccatcacaagcctttccatagaccctcagtggtctatcccagatcatccatggcctcagagtcattccagactcatccacaagcccatcacaaaggctctggcatgtctcagatcaagtgactcagtccaagtcacacatgcctcacctagagccaaaaccaacagtctccaaatcacaaactgaaagctaatccttcctcctcacatcattctaaacacttctctcaactggacccagagctaattctagccctatcacagatgggtcactattcacccaaaacccccaaatccaaaatcaatcagagaaactcgagtttcttacctcagaacagatgaggaaggcctctaggctactctccctagccttggtgccgctgaaccaccaccgttcctcgccaaactcgagcttccatccacctctctggaggttcctcagaaactggaggttttggtgaaagggaggaaggattctcgctctcactcggtttctaggaagattactgggttctggagtgtttaggggtcccaaaacatggccatgggagcttgggaagctctcccatggctgctggagtccagaggaagaagaagccaagctttttggccaaaaatttcgtaaatggcctttaaattctggttctgccaacgttcccacgctactcgcgccatatatggcgctactcgcgccatagtccagtgcaaaacagactttctggagcacttatggcgctactcgcgtggactcccacgctacccacttgggctggcagaaagttcccacgctactcacttggactcccacgctacccacttgggaggccagacagcattggcatttttatacacatggcgcgggtcgcgccgcactccacgtgggtcgcgccgaaggccagaaaaccctatttccactatttctcaagcgtttacgcctccttttaaggaattccaaggcatatttatatatcctccattataagcttaatcctaagcttaacgcatgcttcctcatatgtttacaaatcccagatattacattacacccctcctttttagaattctgtcctcagaattccattcgactaaatctggtcctactcaggagccacatgtcctcgtaggttgtgtaggatctatcagattctcttaaatctgatcactgtcgggcttccacacgtgatgtctccattacatcatcatctggaacacatggcaactcttatgccatctaggtaactgggaggcaacctcctttccctcaaagcccatcctacacctgtgacctaagacagcctcagacacctctggttatccttaccaactgtcagggtaggtgtctaggattacatatcattttcattgactctgagctgtcacaacatttcttggatcctccagattcgctcaagagtccactgaaccatctcaggttcaagaaactatctttgcctctatctctgccagatcaactggagtcctgcactagtggccttcacaaagcctcatcaggtgccatgttccactaacatgtgaactaacacgatcaagggactccatcataggcagatcactaacccagcctgtaccttgttccaaggtacgcttacacaacacatccttcaagatctagatggctcactccatccgatcatctttctgaggatggtaggctacactaagtctcagctgggttccaaacctttcgaagaacacctcatacccagaggtaacttcggatcactgtcactaaccaagtgacatatcagacactagccatacccatagctatgtcttacctcatccctggccacctgaaatcttctcaggatataaccacatcacagtggcccttggatgaatatccaaccagtccttataacctcataaggacggcatcaaccagctctctctctatatgcaccctcatcaggcttagctcatcttaagctaggtgctttccaagagacatcttgccggtctaccatagccctcacagccacctcctgcggctgggtctcacagatctccgctgcgctactctgatcaccatcaactgggtccctctcaaccagagaccagatgattccctgtcatcgacaggcctatatctctgagctgctcattcagctcacagtcaaagactgttctcacgcatggatcactcccatgctatcctgctcgagatcttaacacatgtccaagtctctgctaggacgtatctcaagcacaccggccatctggcctggacctcctggtcccatcaaacacatgagcaaacatcttgctccctacatatggcggagctgcctcaacgcctagcggagctacctctacgctaataataaacaaatggcggagctacctcaacgcccagcggagctacctcaacgctgatcacaacagatggcggagctacctcaacgcctcgcggagctacctcaacgcgaatacacatggcagagatccctcaatgcctggcggagaaccctcaacgccctgacggagaaccctcaacgtcagtatgatatcagatatatggcagagctcctcaatgcctagcggagtatcactcaacgctctgacggagctcctcaacgtcagtctgatatcatcataagtctcaacacatgacaggtggcagagctcctcaatgcctggcagagctcctcaacgccactgatggagctcctcaacgtcagtacctgtcatgatgtggcagagctcctcaatgccacgggcggagctcctcaacgccctgaccaaccagcagagctcctcaatgctggtatatatctattgaccaataggcggagctcctcaacgcctgaatacatggcagagctcctcaatgccagtattcatcaattggccaacagatatatcacaatcacacataaatatatcacatcaatacaaacaatgccatagccaaagcatacagcatgaaacatgacccacactccagtgtgtgatctggactaacatacgtgtcgtcccctcgggaactatcccttacacatggacgcacgtctatggcacctccgaggtatagaaggagctcctcaacttctatcctcttggtctgtacaataaccaattctctgggagctcctcaaccagagaaaaccaactaggaggaaacccctctcctagggaggtccatctcaaaccactcaacatccaccgcttcctcgaagcgtggtactctccagcgcacctggagaactaacatatacatctacccatgtatatgtctcaggtatataaccatatcttaactctggtcagaatccctctgacatcatcatctagtacctctggagattttatctctgtgattgtcctcctcaggacacattccacacagtggctctactggccacatatcccatatcagctgacgtataagacccactccccagtgaggcttcccacaagcatcacattgggtatctcaggcctctgcaacactcctctatgattgggcaacctcaggcacctttgagctgtagctaaacatacaaccagctccgcgcctttggccaacataactgggtcagcatctctgggtcgctctacccgctatcccaccgagtaagaaaactgcttacctcggtgtctgctaaacacatactcagcttggcgacactatctcaccaagctgtctatatcgtgagatccattgctggccatcaacaccactagatcccctttaggtcccctctggaacttagccgcgaggatatcaacatcgggcctggatctcctatcatgagcatacttggctggttcagcaatctaagccaagttctcaaccacagtcatgtctctccctggactagactgtcaacctctgcctatttctgctctcaagcattcctgagatatcatacatattcaggaaacaggcctccgacctctatcaggtaagaatctctccctggcccatctgtaatgccgctgtggtcttccaccactcatggcatcactctgcagcacacaggtcgcctacagcaacctctgctggtccaaacaaaccatcacctcaaagatcttattacagcctatagccaccatgctgaggcacaagatcataaccactggggaaggctggagggtcatgctcacaaaacaataagcatctgccctcggctgcaacatctatctctgtgtaaccacatgggacatctggtcccctgacaggtgactcccaccaacctgatggcgacttccttcgccctcattacctaggaggtgtaggggaatacttggtcacccctcctttaacaactcctgatgagccttcatcaaggcctcatacctctctgtgtcagcagctctcagccactgcacatcctcctgaccctgcctatatgcagctaactctggctgcatggccaccctctcggccacaactggatcagactgtctactggttgccctactgttgttcctgaatctcggcatgacattgcacatgtacacaaacagtgagttgatcaggctcacatcccgtgtacccacatgcaatactcatgtcagatcaaacaacaatagcaagcaacaccatattccatacataatgtctctatcaagaaaccgctctgataccattaaatgtaacaccccggacgtctccggcatgttatcatcaatgatatacataacacgctatcggtgttaactaagcgcggtgcggaagcgatagaatcgtttatcttgattacattatgcatggaatataaaaccacacacagaaacctaaaacaagcccctgctgatccagatcaaacataaacaattatataggcagatgacagaaaacataactcagataatcaggaggaatcacacttatatacaatcatcatcatctgtacatatacatgctcaaaaacaagaccacagctgggtcatacattataatatgtacaggaaatggtatacacataccctacaactacacagagatctaagaccagcttcaactcttgaagctctgctctgatcttctactgcagcctcccatccagcctctcaggttcactagggcctcctgccctgaggtcgctcctctcctcaagaagcacctgaaaaccaccaaccccacacagggtgagacaaatgtctcagtaaactcagggttctgggaatcctccctaaccctggtttaccatcaagcgtaaacaaaacatataacagagctgaggaaaatcctcctagctcacacatacaaagactaggacaacatcctagctttcacacatcccagctctctgggtcataaacggatgctctcagcatcagaggtattcaacctcgtcctggctctctcagccatatcacagagaacaaagccataaccatggcatcaatgtctcatctaggctctcatagcctggctcacagacatctcacagagatacgtatcatcgtgtctctcattagacacttctcaacacaagagaggcaccgcctctgaaccacacaaacattgcctgaggagaaccctcaactcaggactctgaatcttgcaaacatggcctgaggagaaccctcaactcaggactctgtaaatccagatatggctcatctaagaggccttaggctctagtccccctcgggaagccctctcttagagatacaacatatctgtctagcatctggcctgggaaaccctccaggactttcatgacacatgcctgggcaagaacatccatatagggcaatcacctccaggacttttgtacacactggcctgggaaagaacctcctttacagggcaatcacctccaggactttcacaaagactggcctgaggataatcactcaggactttcaacaactgtgcctaaggaggaacatccacacagttccttctggccttaggacttaagtggagagccgtggcacctcccaaggaatctcagctattccagggagtcctcaaactctacctctggctagggaacctcagctagcctgatactcatccagtatcctctaggttccatcacagaccatctcatgatctgcattctctcaaaaggctcacggcctcacacctgccacatcaggtgtctcataaccctcacactgtttcagtggctatcctagggttcatcatatattcatctttctagaacggactgagttccactctaagtaccgttcttcagcctttcaggcttcccacccctagaatatcaataacaggccacctaggccttcctttcaattgcatgcataaacatatatataatcaaacatagcatgcaatcttcaccctacttggatgccaaaccaaaataagggaaaactccagaaagatgagcttacctggctagccgtacctcacagctctagcctccgctgatggtctgctactctgacaccctctgtgtcaagccctaccaaggcatacaagcacacatcgcagaccattcaagcatataaacatgcacaagctcatcaaacagacatccactgcctccgggaaaggaaccacagtccttcccatcaacctgagcatctactctaaggttcatcaggctcatccatcacaagcctttccatagaccctcagtggtctatcccagatcatccatggcctcagagtcattccagactcatccacaagcccatcacaaaggctctggcatgtctcagatcaagtgactcagtccaagtcacacatgcctcacctagagccaaaaccaacagtctccaaatcacaaactgaaagctaatccttcctcctcacatcattctaaacacttctctcaactggacccagagctaattctagccctatcacagatgggtcactattcacccaaaacccccaaatccaaaatcaatcagagaaactcgagtttcttacctcagaacagatgaggaaggcctctaggctactctccctagccttggtgccgctgaaccaccaccgttcctcgccaaactcgagcttccatccacctctctggaggttcctcagaaactggaggttttggtgaaagggaggaaggattctcgctctcactcggtttctaggaagattactgggttctggagtgtttaggggtcccaaaacatggccatgggagcttgggaagctctcccatggctgctggagtccagaggaagaagaagccaagctttttggccaaaaatctcgtaaatggcctttaaattctggttctgccgacgttcccacactactcgcgccatatatggcgctactcgcgccatagtccagtgcaaaacagactttctggagcacttatggcgctactcgcgtggactcccacgctacccacttgggctggcagaaagttcccacgctactcacttggactcccacgctacccacttgggaggccagacagcattggcatttttatacacatggcgcgggtcgcgccgcactccacgtgggtcgcgccgaaggccagaaaaccctatttccactatttctcaagcgtttacgcctccttttaaggaattccaaggcatatttatatatcctccattataagcttaatcctaagcttaacgcatgcttcctcatatgtttacaaatcccagatattacattatagaggctttacaagtctatctgttgcttgttttcatgagtgttttgagagtatacagttgcctaaacatttgagagatacagtgtgatacagtgcatctggtgaggttctgttgcttttaattcacctcttgagcggattgattgttttgttgagttttgaatgcttggatgaatctcataagtgtgtaatttctctgactctttgtgtgttggaaattgtcaattcctgtctctttcccagttttcattgaggattgtgtagaactgtttattttatggtgtgtcattctttctttaaaatctttagaattgttccttgctctaatttttttgattttgccaggagtgcaaaaggctaagtatggggggttttgatgagtcactatttatcactatttactcatctttctgtactcattttaatccctaacttgtgcttaattgtttatattttgcattgtttctcatttaggatttaattggaccaataattcagattttaattaatttggattattttaagtttaattattctaaattgattttcagggtagattaataattaaatgggcttggaattaattcatggacttgaagattgggatgccacgtcatcattattttccgcatcagcttggaattttcgttttattttattttattttcgttttgggccaaaattgttaggaaaaacccattttcgttttaggtcggtcactctatatatttgggaactgtgcccatgcagagaaggagccaattttcgttctattttctttaggagccaattttcgttcttttttctttaggagccaattttcgttctgttttctttagcagccaattttcgttctgttttctttagtagccaatactatttcgttttagggtttttagaatattttcattttctgctttctctgttctgttttcgttttctattttctgaatatattcgcgtttcaattcagttttattttcgttttttgtctgtttcatcttcatcttctaatttcgtttttgctctctgtttcagctattttgttttagctttaggtttttcgtttctgtttaatttcgtttctgcttttaattttgtttaatgtttcgtttcaattcaatttacgtttctgtcgttaattttgaatttatggaaggctaaatcctagggttggaccttaggacagattgcagaccttcaatggaggttctctatgtgcaattcatattctgcttgttcttccttgtttgggtttctgttctgcattttttgaattaggatcatgcttaatgattctgagttgattgattcagtaatctcaggttgcttaatcctgagtgcttgccctaacgaggttcacgtttgcttaattcgtgtaatgacgttttaggttaatttttgcttagttgattaatttggactgatgagaattaagcaggacagattatctttcgtgaaccaaggatattagaggcgcaatctgttctaaggtctgacttgtttttaatcactgcaattaattgttaatttctgttttaatttagttttcgcattctgccaaaaaaaatccccccaaaacacgttttcaatccctaacgcagataattgagatccttgagagacgacctaggagtcacttcctagtactacatttaaaactgaattaatttggttgcgtacgatcgcgatcaagctttctcaaaagatcaattaaatcactgttcttagataaaagtaacatatacttttctccttgactctttttgtaatcatcaaaatctttttgcagcaagttatatttgtcaacatttgtagaagaagaagcacacacacatccattcaaattgtaacttgaaacaagtttttcattttcttctttcaagttacaaatctcagtttgcaattcagttatttttgcaacatgccatctaagatttcctttgagcttgttattggattttgcaagcttttgggcttcctcatgcatttcttggaaagcagtaatagcttgttcaagttcagaatttacctcatctccatcacttgataggtcatcgttgtaacgactacgtttcttgtccgtttttaatttattacgcttcttaatttacagaaaaaaaaatttctacgtaaaactaattatacgtcataagttatttattttgacgtgttcgcaaatttgtcaaaatacaaagtttaaacatagtttaacatacagtccaaatacaatacagtcccaaatagtctgttacaaaataagatacatacagctcaacgtaacatcaaatacatacaaccagaaaatttcaaatacagcataaagaacatccagctccttcctcaatgatttccttagcttactgttcttctgctcgcccaaataaattggggtcatcacaggtgtcaaccacagacacaaatcgggtaagtacatgataaacatgattagataataacagaaatagataaataatcgtaataacaattataaaacagatacatgatgaatgatacatgctttctttattatcatgatgcataacttagatctcagagtcctaataaaaggtaccaaagtcagaatagtttcacccactccagtgaaacagtcccacccactctagtgagacctccctccactccaaggggataaaagggtaccaatagttccacccactccagtggaacagtcccacccactccagtgagacctccctccactccgaggggaaataaatgcgaatgatgtatgtaatggtttctttttattttccagttactctttatcattactttaattcaaattctcatatctttggcaccaaaagttttattcacgcatcatgatcaatccaatatataaaaagtataagtgcaccataattttctttaagtatacatattccactagtttcaacatcttaatcaatataacatataatcttaatacaaattaaagtgccatatcaagtgagtagcattcaacaacatcaagtaagtaacatacaaccctggtactaatcaagattcatcattaagtgagtaacatacaacaacatcaaataaataacaaagtaacatatagccttaataaaacaattaaacatagttacaaaatatagataattggatttcctagtcactttcttactagacaacattcaagttaattattccttaagttatttaaggttacttattacctaggtattattttacttctttgaagcatttttacaaacacatggtatacaagattttaaggcttatggaaataaatgacaacctagcttaagtcttatagaattagatgataagataacataattaattatctaagcatgtgtaccatagtacttcccttacctttgcttttcttgtttgaaattaagctacctttttccaagaatcctagcttttccacgtgaactactaaggtgtgggccattgtgggcttttgtttttggcttttaattcaaagtgaaaaggattgagaatgaaagtcgggtgttgtccgtgtgctaaccccctcttggtccccaccactctttttttatatgctaagtttacttggctttttctacaaaaatcttcaaggtctatgattacatagctttttggttggttttctcttattggctaacactttctctccctccaagtatccttgttcatgagagttccacagctttccctagctttcttgttttacgcgtgtagttgcttagtcttggaacattccatttgcttcaaatccgtgtagctttaggtgttgtagatttttttgtgcatttgtttcaaagtagctttctacttggtccaataatatttcttcttgctttttggttgtccaagtgttttatgtcttgagttttctaaagttttctttactcttccttgaggtgcacggccaatcttggattttgaggcaatatgttttaattttttggcctaaaccgtggggtagctttaatttaaggattttcatgctttattttacttaacctatgtcttaaatttgaataaaattgtttctataatttaggaaatcttaattcaacttgatttcttaggaataaaattctaaaattggttaaaaattatcctaaagtttagtaatattttttaagatgttaccatcttacatccaatagttttatctaatttcttattggttatctttgtttttgattagtaaaatatttagatcacttattaaagaatttatttctaccataattaagaaaaaattctttagattgtacctttcctttttctgtgtttttataaaactcagattaagctagattcaattctttttgaaatatctttcaaaatttctaaaaatttcatttcatagtttttctttactaggaatgtcaataattccttatctaggagcctactatcctgttgtcaggtttctataatcttactgaagctgtatgaccttatcagagctaaaagggtattttggtcatttgcacaaatgttcaagggcattttagtcatttatctcagggacctaactgtcatttttgaaattgtctaaggatatttatgtcattttcaaaaatgttcaagggtatttatgtcatttgtctaggaatgcatatttatgagaaaatgcacatatatattgaaatctgagggtgttacaactctcccccccttaaataaatttcgtcctcgaaatttacctggttcaaagagtgctggataacttttttgcatctcactttctgcttcccatgtagcatcgccatttgcaccatttccccagataacctttaccaaaggaatttcttttcctcttagggtttttattcttttatccttaatccttactggaaaggtttcataagttaaattctcctttataggtacatcatctagttcaattatatgggaaggatcatggatatatttacgtatctgggatacgtgaaagacatcatgaaggtttgaaagatttgggggtaaggcaagttgataggctactggtccaactcttttaagaatttgaaaaggtccaatgaatcgaggtgtaagttttcgggatttcagagctctcccaacaccagtccaaggactaactcttaaaaatacatgatctcctacatcaaactctaaatccttccttctttgatcatagtaatttttctgcctgctttgagcagttttcatcttttcttggattaacctaattttatcagttgtttcttgtacaatttcaggtcctataattaagttttctccagactttacccaacatagaggggttctacactttctaccgtataaagcttcgtagggtgccataccaatggtagaatgaaaactattattgtaagtaaactctattaaaggtaagaaatcttcccagctccctttatgctctaaaacacagacccttaataaatcttctaaagactggatagttatctcagtttgtccatccgtttggggatgataggctgaacttaattttaattttgttcctaaagctttatgtagactttcccaaaatcttgaagtgaatctaggatccctatcagatattatacgggaaggaaatccatgtaatcgtacaatttcttttatatacaaagtggttaatttttctaaagaatatcgaatattaataggaataaagtgggcacatttggttaatctatctattataacccatattgaatcagaacctttagaacttcttggcaaagaggtcacaaaatccatagagatactgtcccatttccattggggtatttctaaggattgcaacactcctaaaggtttttgatgttctacctttgatttctaacaaactaaacaggagtatacatattcacctatttccttcttcatttttgggcaccaaaataaaattttcaaatcttgatacatcttagtggctccaggatggatacttaatttactttgtgtccttcttctaaaatcatctttttaatttctggatcattagggacacaaattcgttcttgtaatcttagaattccatccattcctatcttaaattgactagtccctccacggcaaaagaaccaaaagggtgtttttttaaaaaatatttaccgataaggtgcgttttcaaaaatatttgcaaatctggtgcaggagggtacctatatttacaaatctggtgctgtgcaacatgcctggatcaggcatgttacaacacgcccaacccctaaaccctaaacccaagaccctagccaaaccctaaaccccagacaaaccctaaaccctaaaccaaaccctacatcccaaccaaaccctaaactcaacacaaagccctaaatcccaaacaccatgtacgcctgccgacacaaccctaacccctcacccgaatacccaaccaatccctaaacccaacacccttaccatggcgtccttcgccgcgcttcctccattggtattacagcgcagaatttataaagattaaaaaaataaacaataaagaacattataactactagaaagtaagaacgagaacagaaaaaaattgaacagaaatggtgcagttgaagagaagtaagaacaacaacagaaaaaaaaatggtgcagttgaagagaaggagaaaaaaaaaagcaaacggcgctacaaaaggttggagaaaacaatgtacgtcgaggttcatgcttttagggtttggggggttcaggttaatggttaatgatttactgttgatgttggttaggttgatgggggcagacatagtagtccttgccatatcgtgagttcatttcgcatgagccccatgaccacaagggaactgtgtgttttgcttcttctctgtgtatatgatgatggacttggcactactggaaacaatgtacgtcgaggttcttgcttttagggtgtgtgggttgagggtttatgggtactactggaaacaatatacgtcacataccatgcccaccaaaccctaaaccattaaccacaaaccatcgtcgtttaggattggcggtccaggattgtagggggtatggtttagggtttatggttttggtggacattggtacatggtgtaagggtttatggttaatgatttactgtttatgttggttaggttgatggggcaggcatagtagtccttgccatagcgtgatttgatttcgcaagagtcatggccacaagtgcactgtatgttcctgttggagggaatagtggaatcttttctaggtgagaaaggtttggttttgggggatttggaaggacaacactaagaccaacgtcctcactgagcaccgtcacggactagtggtgagcgattgagcggaccagtggtgagcagagcgactgagcagactagtggaggactggaggcttgagcttagatttaggtttttccaactctgaggactatgagcatgagctgatgaagaaggtgaatgggagaaagacatgatcagacgttttctttcttgttgtgttttgcttcttctcaatgcagactgaagagtgaagagtgtgattggtgctgtgtatatgatgatggacctgccataagtggaaacaactaatgaaaaactcattttaacctgtgactttattcgactccccaggtcagtcaagtccctaattcctcgataacagggtctcgtgattttttcttgttgtgttttgcttcttatctatgtatataatgatggacttggcacaagttgaaacaatgtacgtcgaggttcatgcttttagggtttcgggagttcaggttaatggttaatgatttactgttgatgttggttaggttgatgaggcaggcatagtagtccttgccatatcgtgagttcattccgcatgagccatggccacaagggactgtatgttcctattagagggaatagtggaatcttttctaggtgagaaagcagtttgcggggattaaagggttactctgaggactatgagcatgagctgatgaagaaggtgaagcattttgccaagttgaaaccaaaatcatgaaaccaaccctaccccaaccctagcccaaatgtcacataccatgcccaccaaaccctaaaccattaaccgcaaaccatcgtcacataaccatgaaaccttatcctaccccaaccctggcccaaacgtcacgtcccatgcccagcaaaccctaaacccttaaccacaaactatcgtcacatgagcgtaccctaaacacaacctaaccatgcccagcaaaccctgatccctcaaacacgaacaaaatcacgactcgaacgcatgcttctcgtcactcaaaacaccttcaaaaatctcttaaaaaacaaaaaaataccaaaatgatggcagtttagcagagtcaaagaacactggaagccaatatatgaaccaactggggatcggggggggcctatttgcaaatctggtgcagctgtaacatgctgaattaggcatgttacaacacgcccaatctaggcgtgttgtaacatgcctaattcaggcatgttacactacactagatttgtaaatataggccccctcttgcaccagatttgcaaatatttttgaaaacgcatcttatcggtaaatattttttaaaaaaacacccttttggttcttttgccgtccctccactttctattttatctattatagtccttaagaaagaatcagatctttgtttatttcctatttctttcaaaaaatcattagaaacttgtaatgctcctaatttaatacttactggtgtagtttcacacatcaaactatgatctctaaattgttctaacaaatctttttctctaatcatcaaagactttctgcttaaagcatcagctactacattagcttttccaggatgataattaagttcaaaatcataatccttcaagaattccatccatcttctttgtctcatgtttaattcttttttactaaacaaatatttcaaactcttatggtcactaaaaacttcaaaatgcgaaccatataaataatgtctccaaatttttaacacaaatactacagctgctaattctaaatcatgagtaggataatttctttcatgaggttttaattgtctagatgcataggctactactttgccatcttgcattaagactcctcctaaacccatcttagatgcattacaatagactacaaaaggtttttctaaattaggtaaaactaatacaggtgttgtggttaatttatttttaagagtttggaaactttcttcacattgggtgttccatacaaaagcttgtccttttctagttaaggtagttaaaggtaatgctattttagaaaaatcttgaataaatcttctataatatcctgctagtcctaagaaacttttaatttcagtaacggtcttgggtcgtttctgtaacgacctaatttctaaattaattttattattattatttttacttagaataaaaaattttccagaaacgtgtattagtaaaaattctaagtcattaaaatttacaaaatatgtaaagactaatacattagtcaatgtctctgttacaagagtttatacaagtacactactttctcaaaagtccagcttagtacataacttcttttatatatcatcactactccaaggcttcatggaacctgtccatcattgccatctaaaaaaaaacaggaaatatatctggtgagaaataaatttctcagtaggtaaagctaaatcctgactctattattaagttagtaaaatcataaaaaaatcaaaaacacatccacaagcaatatgcaaactatatgaatgcatgaaatgaactatcccagggcaaatggctcccacatatcgtactgtatgtggccacgctgagcgtggtcgctgctatagtcttacgcaaacatgcatgaattttgccatatatccttacccatgggtactacatatcgtactgtatgtagcatcagattatgtttccccaaagcctcgtactggacttggaacatggaaacatgaatccacctatcttaatcacatcaatcatccatatgaaaaattaaatgcataagcaaaacacagatcatatcatcatatatatcataagtatggttacaccaccatattttatccaataagcttttataagtatggttacaccaccataccttaatcaagtaagattattaccaaacttatgcataaccaaagaatgaccttaactacagaaaaattttgttagtaatctaactaataatcctcaatataaataatatctaattcctttaaacctttacaagcaaagattcacacctagtatacatcttaattctcctttcacctaccaccacactaattaatcctcaaaatcaaatcatcaagtatttaaaccattcaactccacaccattcatcctctacttcaaaaattaaatcaaaacatgtccataaaaatataaacagacagtccaagtatcattaaaatcacctcacaagatcatcaaatggacttccataattcactaatattgatgggtataaatcataacctatcttatggcttaattcaacatattctcaccaaagaataaccttcaaatagcacaaaattcaagcctaaataataaccataatttagcatgtaaattaatccaactcattgattaactagagatttaacttcacctacctcaagtgagtttgaaccttgcaattgaatggatagatggcttccttccttcctttcttccttggaaaatcctcttagagaggaagccttgatatccttttactaagcttgacaagaactcttcctaaggttgctaggtttctcatgaaaattctttcaaaatgatgggtttgtttttcttacttcattcaagctttataagagaaagatgaaatgaaaatggtgtagggagagagtggtcacgtgaatgagggtaggagaatgccttgggaatggcttgtgttttaggtccaccacctccctttatatagtggtttaggattcattttatggaaaaatatctcctacaccataatggcttatctttccacttgtccacccctttacaagtgtccctacacttgtccaaatcacaaaggctcttaattttccactatccaagtgtccaagctcttgaagtttcttcatttctcttgcattttcgtggagtagcttgccaaggaagatttttatgttttttctttcattcttgagtttatcccaaacctgttgtagtaaaattctaattctggattcgttaaccgttggatctctttaaaattttaagggtacactactatctcacatatgtaacttatgacggttgggattgttgaaataatgtttatagctgtccacgtgcaagatggaagagtgtagagaaatcttggcttgatttttatgttacattgcatccatgccatacaagtgtcttgccacttgttttcatcctatgacttatcttccaagtggctaaattcaagaagcttcttcctcattctccatgtttctccacgtgaatgacaagctcaaatgcaagggaacacaaatttttcttcctttcatgctacatgtggtcatttttgatgatgaataaaaatctagtttcaatatggtattttctttaaaaagaaatccaatttaatttgaattcttttatctaaggataattgggaataatagatctctagatgttcctaacaatttatctcaatgatagtttaaattaatctcaagcagtcttatacagggcaatacataaacctttcattctagactacatcttgatcttgattttgattggtctatacttcttctgaccatcaaaattactaaaccattttattaaataggtctatccatcctataattaagagaaaattctatagatttcatttatcatttttccatatttttctgatgcttgagttttcttgaataaagcctcaaagttgtcatcttataaaatttgttgaaattttattctacagttttgtgtcacaaaatttgttgatacttagtcagctaagtgtattctataatttcatcaagtttctacaaaatttctaaagttatttgagcatttttggcctagaggcattttggtaattatgccattcaacctaggtgtattttggtcattttaaaaatgtccaaggacatttttaaaattttcatcttaagggttttctagtaatttctactatatggaaagagtgagatagttatttttctctaaacatacttctatccaattatcatcacatttttaaaattttgtggatgttacagtttccattctaacacagcttgtactttagaaggatctactgaaattcctcctttagagatttcatgacctaagaaatttagtttttctaaccaaaaagcacacttagacatcttggcataaagttgtcaatcctttaaggtttgcaacacaattcgtaaatgttcggcatgttcttctctagtcctagaatacactagaatatcatcaataaatactactacaaatttatcaagataaggatgaaacactctattcataaaatccatgaatacagcaagagcattagttactccaaaaggcatcactaaatattcataatgaccataacgagtactaaaagcggttttgggaatatcttcagattttactcgaatctggttgtattctgatctaagatcaattttactaaaaacacaggctcctactaactgatccatcaaatcatctattctaggtaaaggatatttatttttaattgtcactttatttagttgtcggtaatctacacacatcctcatagatccatcctttttcttaactagtaacattggagctccccatggtgatacactaggtctcacaaattgtttattcactaattcttctatttgtttctttacctcagccaactctataggggacatcctatagggtgctatagaaatgggtcctattccaggaattaaatctatagaaaattctacttctctttcaggaggtaacttatctacttcttgaaatacttaaggaaattctttcactacaggcagatttttttcatcagattcagttttagattcagagtaagatgtaatcatgtatatttgaatatcattctttttcatcattccaaggactttattaggagagacaatctgaatatccttactaactaaagggttttcaacaaatattatagttttattgaaacagtttaacatgacatgattggaagataaccagtccataccaagtatgacatcaatttcttgtaagggtagacagatcaaattaacagaaaatattttatcaccaatttttaatggacaatctagacaaatttcagaagtaataactgatttgctagtcggggtagttaccatcaaattgacatttaaaggagacacaaaaagttttagattttgagcacaaaggtaggagataaaggaatgagtggctccgaaatcaaataacacatttaaaggagttttacttatgaaacacttaccttgaattaagtcttcggattgagaagcctcagctccactaagagtaaatactcttcctgtggcttttggtttctccgggggatggctttgatttccttcttcctttttcttgcgattcagaggacagttcattgcaaaatgccctttctgattgcatttgtaacatacaggatttgttactgggcaggaggaagcataatgtccagttcttccacatttaaaacattggatagaaaaataggaagaagtttggttggctggggctctataacttggaccattaaaacgacatttttgatatgacttttcttgatttggacggtatcccatcctttccctgacagtgtaatatcttgaattttaagcatataattaagcttagattaagcctaggatgaaggtttatagtgatacttgagaatccctaagagaaaggcttgagaaaagatgaaataaactgatttatgagttttctgaagctccacgcctgaggcgtgggatcccacgcctgaggcttgggaaacagcccagaaagccaattcttgctggaggtccacgcttgaggcgtgggagccacgccggaggcgtgggaagttgcccagaagtgaaattttggctggaacgccacgcctggggcgtgggagtccacgctggaggcgtgggagtcgcggcagaggtctataaaagggccatttgggctgaaaaagaagggaaaagagtgagaacctccattaacgagtttgagagcttcgtatcttctccatagctcatctaaacacctctgacccaactgagaaaatgatcaggacctcgagataagtaaaataccccgattgattctcgagaaaaggtgagaaatagtgagattggatttccctgagagaacccttgagagctcggagtttgaaggcgcagaaggctgtgattgggcgaatcatcttagggaaagctattccctggtgtttctgaacgccacagaggtaagaaactcgagctctaactgttggttctatgtaatggatttcggggttttgaggttatcttgaggggtgtttttggaggtgttagagccatcattaggctcggactctttagagtcttatgctcaggagagcatcctgagggagttagagccttgattcatcattagtgatgaagtttgattttggctctgagtctgcttatgcagatggaaaaggtcggctatttgactagtctggaccttagagcagttgacaaagttgctcatgaggttagatagatgagtttgatcggttgaaactaatcattatgagagattggatctaggccattgtaagcagagttatgcttgaccatagttgatcagagcttgtgtggaggctctgtagccttgtataggctaagagagatcctgtggaggggtctgataatcacttatacagtggtctagtttggtttgaacggtttagaaccgtaattgatgtgatatgtgtttatctatgtaggacgtgagcctgatagctcaggtggtgttgaccacaggaccgggagagccggtgacgtgtccagagcaggtaagctcttgtttccttgatgtggttcctttgctgtgttccaccacactcctaaggggtgatgggtttgttatgcctatgtggtctaattgatttatgatgttgtaatctgatttggacccagtgatgggctattgtggtgcatagctatgtttgattagctaatatatgcacgattgattgtgaaatcctatggttataggatagatgacatgtgactgagataaacctgacatgagatgtttcctgtggtatagaggtagcctccttagggagagatgttcctatactcacagatgtagcctcctcaggtgaattgtattgatgagacatgagttgtagctcatgatagaggttgggccaatatataggagtcctccagacgtggttgtacctatatatcttcggaagcgcctctgatacctcctgccatgagatggtctagtgtatgatctagatgatagcctccgcaggttggtaatgatgatggatagtgacgtcctgccatgagatggcctagtatgactaggtgatagcctccgcaggatgaggataggtgatagatggtaatgaccatcagaatcatgtggacattggcagatggatgtatattgcttgtatatgtgatgattctgtctgtgtatctgtggtcagtgaaccaggggaaggaaataccttcaagggccctgagtttactgagattttatatctcaccccttgttgtggggctatgttttgcaggtgattcttccagagcagcagagagatcccagggcaagaagcctgtgcaggattagctgctgaagagcactctaggatagaggacttgagcatgtggctcatatgttttggttatgtactttgatataccctgatgggttagttgtacagtttgtatggtacagtgagaactttgatgtatattcaccataatatcatgtacagtgttatgatagtgaccttaatgctgtcacttctagtttatgcttccaaactgcttaaactctgattgattatttgattgtttgtgatgtgtggttagtaatgaccctgattagtaaattggggcgttacagacagtccccacattcttgtaatgacaggtcctagctcgtgagtcctcatcatagattctacacatgtttattaactgaggaaattgacgtaccccttgataatttactgcttgttttatttctggccttagtccatttaaaaatttaacacatttagaactttctccctctacaccatgatagtgaggaaaatatctcaccagttcttcaaatttgactgcatattcagctacagtcatatttccttgttttaattctaaaaactccatttcctttttatttcttatatcttccggaaaatatttttctagaaaaccgttttgaagacctcccgagtcatttcttggttattggcttctaaccttaattgagtattctcccaccaaaattcagcttcatctgccagcatatatgtgccaaaaagtaccttcctatcaagaggacaagtcattactcgaaaaatcttctcaatttccctaagccatgcttgagcaccatcaggatcatagcctcccttgaaacttggtgggtggtttctttgaaaactttctaaaccatgatattcattgtttacgtttcgttgttggttccctacagcttgagccaaagcttggagtgcatcggctatagctcgatcgtttctaccggccatatttgtttaagtatatctgtttaggtgtatctaaaaacaacgttagtacattttatctaaaagcaacgttagtaaatttatttaaataatattagtaaatttttatctaaaccatgttagtaaattagagcatagccacacaatttttataatatagatatatttttatttataacaaggtgtacactacttttgatacatctactgttatttcgaaccacacactagtctactacaggcctactattttgttacaccaatacacttatttattatattcatactactacttgatttcttaatatgttacttcctactttatattacactactacttttatttcatcactattttacacatactttctactactattttacatattatcattatttttattttactaaaagttttgtcctactacttccgtaatataatattgattacagatgttgatcgaagcattggcttgatattttactattgtcttataagtggtggtttgattttcggctgattcttcacgaagtctttgcatatccaccacaataaaaatcatactatgattaccataagcttccatcgtcctagatggccaacaaaaagaagttcttcttaaatcatgtaatacaagaaattacacaacatcacaaaacacacatagaacataaaacaaatcacataaaacataacaagcacagataacatagtaatcacacagtcctaaaaaacaaacatcagctctgataccactattgtaacaactacgtttcttgtatgtttttaatttattacgcttcttaatttacaggaaaaaaaatttctacgtaattcgtttacgtaaaactaattatacgtcataagttatttattttgacgcgttcgcaaatttgtcaaaatacaaagtttaaacatagtttaacatacagtccaaatacaatacagtcccaaatagcctgttacaaaataagatacatacagcttaaggcaacatcaaatacagacaactagaaaatttcaaatacagcatatagaacatccagctccttcctcaacgatttccttagcttattgttcctctgctcgcacaaataaattggggtcatcacaggtgtcaaccacagacacaaatcgggtaagtacatgataaacatgattagataataacagaaatagataaataatcgtaataacaattataaaacagatacatgatgaatgatacatgctttctttattatcatgatgcatgactgagatctcagagtcctaataaaaggtaccaaagtcagaatagtttcacccactccagtgaaatagtcccacccactccagtgagacctccctccactcagaatagctttcttgttttactcgtgtagttgcttagtcttggaacattccatttgcttcaaatccgtgtagctttaggtgttgtagatttttttgtgcatttgtttcaaagtagctttctacttggtccaataatatttctgcttgctttttggctgtccaagtgttttatgtcttgagttttctaaagttttctttactcttccttgaggtgcacagccaatcttggattttgaggcaatatgttttaattttttggcctaaaccgtggggtagctttaattcaaggattttcatgctttattttacttaacctatgtcttaaatttgaatagaattgtttctataatttaggaaatcttaattcaacttgatttcttaggaataaaattctaaaattggttagaaattatcctaaagtttagtaatattttttaagatgttaccatcttacatccaatagttttatctaatttcttattggttatctttgtttttgattagtaaaatatttagatcacttattaaagaatttatttctaccataattaagagaaaattctttagattgtacctttcctttttctgtgtttttataaaactcagattaagctagattcaattctttttgaaatatctttcaaaatttctaaaaatttcatttcatagtttttctttactaggaatgtcaataattccttatctaggagcctactatcctgttgtcaggtttctataatcttactgaagctgtatgaccttatcagagctaaaagggtattttggtcatttgcacaaatgttcaagggcattttagtcatttacctcagggacctaacagtcatttttgaaattgtctaaggatatttatgtcattttcaaaaatgttcaagggtatttatgtcatttgtctaggaatgcatatttatgagaaaatgcacatatatattgaaatctgagggtgttacaatcgtcatctttattgatagtggaggtgagacacatgttggcttcttcattttcagttgaagattctgaggtagttgactcattatcttcccaagctatgtaggctcttttagatttctcttccttcctcatcttgttatccccttgttgctttttcaagtagattgaacattcagatttgatgtggctaggtttaccacattcaaagcatgtaaaattgttgtcaatcttgttgttgttgttgttgttgttgttgttgttcttgttcttgccggttttagtgaaccttttgttcttgtttttcctcaagaacttgttgaactttctgacaactaagttcatgttgtcctcttcatcctcattacttgattcttcctcttttttagcttttgaagttgcagcctttagtgcaatgtttttgcttttcttttctgcatcttcagcacaagttagttgagacatttcaggctcatattcaagtagcttaccaaatagtgcagccatggacatctttgatagatctttggattccttgattgctgtcacctttggttgccaaggccttgttagacacttcaagatcttgatatttaattcttcagtatcaaagatcttcccaagacctaatagatgattgacaatatgagtgaatcttgtctgcagctgagaaatgctttcattggtgttcatcttgaacatctcatactcatggatcaatgcatgcttccttgatctcctaacttcttcagttccttcatgagtaatcttcagcatctcccacatttcttttgcatttgtgcatctcactgttctaaaaaatttatcagaggaaagtgcagaggtgatcatattttttgctttaaaagcatattgaacaaccttttgttcaacatctgtcatctcatcccattctttgggaatcaattcattggcaacaattttctttggaataaaaggaccattttctatagcattccaagcacctgggtcatttgattgaataaagattttcattctatttttccaaaaactgaaatattccccatcaaacataggaggtctgtaacaccccgtaggcctccgacgtgttatcattaataatatcagattagcgtataaaatatcaattaaatagttcagcggaaacataggatcattttcttgatacattatgtatgaaatcacataacagaaaaccataaacacatgcccctgctgatccagtttatcaaaatcacataaataagacagataacagagctttaggcagagtaaccccactataaacatacacatgtactcagggaacgtctcatatacatattatcaaagttctgtacataacatatacatcagtgttcaccacatcaaggtgaaatcaaaatacatcatccctcacaggggtatacagaactataacaaaatacatcaaaatggagccctcaagctctctatactgctcctcaactaggcagcctagtctctcatgggcctcttgccctgagactgctcttctcgtcctgatggttcacctgaaaccacataaaccccacacggggtgagataatatatctcagtaagctcagggttcctgggaaatcattcccaccctgactcacggattcacaacacaagcattaaacaaacacacacatcagaactggatccatgtcctggccctctggccctcatcacatcatagcattaatacacaacaaatggcagagaaccctccatgccctggcagagaaccctcaatgcctcggcagagaaccctctatgccgttcctagtggcagagaaccctccatgcccttaatacaaggcagagaaccctcaataccctataccccaatctattggccaacaggctcatctcaattataatcattcatccagtacagatgcacacaatctcaatacaacaatatcacagttaatgcatgcatcatgaatcatgaccaccactccccaggagtgtggtgtgcaatcaagcggaaattcattccccaaaacactgaacttacctggtaaggtctcagactgtagttcctttccaggtctgtggctcctgccaccaacagtatcaagctcacggcctgatcaaagcatacataatttcagatcacaaccagcccactggtttacaatcacaaaacataaaacaacataaatcccctatcctagggtgttatcaaacttagtccacttgggactactcagagaccttcacaaggtctttcaggctagaggccaagctgctgagtcaagctaaactcatcacaaaacatccacagacatgaccttatttcatcagcctccacaaactcaaaaccacaggaatggcctaaccttcatcaaggtgccattcaactagcctcacagactcataacagacatagtctaggctctggaatggcctctacactaatgtagactcaacacacaggccacacagacaaccacagagccaaaatccaaagtcatcataatcaaaaactaaaagctaatccttcatctattctaagccctgatcaactttctcaactggaccctgagctaattccagtcccagctcatatgggtcactattcacagaggcccccagaatcaaaatcaaacggtgaaatctaagtttcttacctcagtggcgcacccaacagccttagaacagcttctcctagcttccacgttccaattacgctgtggttttacgccaagctcgagttctctgagcttttccctctgaggttcctcttctcattcaatctggggttttcaaggaaattgatgaaggattcaagctttttactcggttcaatcaagtttctaaggctcaggaaagtgtttaggctgagaaatcaggtcctaggaagctcaaggacctcaacaatggaggttggctcaagggaggaagaagaaatggaattttcttccattttctcacattttggcctttaaaaactggtctgccgacgttcccacgcgactcacttgacctcccacgcgtttcacttgagatggcagacagaaatgccctttctgagccacttcccacgcgactcgcgtcgtctaaccacgcgactcgcgccataccttctggccttccacgcgacacgcgtggatcccacgtgactcgcgtggagcctcagagaaaaccatgttttctggaccacttgccacgcgactcgcgtggatcgtcaagtgactcgcgtgacatggcagagtcatctgccctatattacacatatggcgcgcgtcgcgccgcaccccaagtgggtcgcgccatatgccagaaccaccataaaacttagattcatgcttaactaagcttaacatatacttacgaattcaagctattacacttggcgccatctgccaatccttgcgccaccggcgccgcacccttagcagggttttctgacctgaatccccgcgcgacaccgaaaataaaagtccttacaaggtctatttagagaagcaccttccttgaaggttatttgtgaggtattcatttttctttttgaagaaaaactagtgatcttaaataactctcaagaaccaactcttgataccaattgaaaaaaataggaatacttcacaataaccaagagaaggggtgaattggttaaaaccttgatattataaaataaaattcaaatcagagtttcaagatctttatcactttcaaaaccaagaaatcaatttactcaatccaatgtctcaactcaagaatccaatagatcaaaaactaagcttgttgaacaatgaatatgaatcaaagaattaaagatcaatgaattagatgagaataaaaatatagaatcaacacacaaacaatttatactggttcacttcaaaacttgaagctacatctagtttcttccaaccaacactaggttagagttccactattataaaatttccagttcttacatgcaattacaacatctcccctttatcaatcctagataaagatcaaaaatctaaaacactattagattctaagagacaaagaaccagagaacactactttgttctttacactagagaacccttctctagatataagcaagaacccactttacaatagcaatcttacacagaaattcagaacgaaatttacacacaacaattaaggcgagagataacctaatgatccaatgaatgaatgcatatgaattaccaaatcaagttgagaagaaatcaaactcagaacatacttctccttaatcttgaaaacaatcttgctcaagaaccattcaaagacccattgatgttttgaatgaagcaagaagtaaaaacacttagaaaatcacttaggaatagcttgagaggcttgtgtatactcaaaaatacgaattatcaagttgtaaaataagctcagcctctattcctatttataacagaatttgtaactaactataatcgattaaacgcgcctaataatcgattatttttcttatgtaatcgattataataactctgtagtcgattaatccattcaaaaaatgattctgggatttgcaacgagcaaaataatcgattatcccgagctgtaatctattaaaacagaagttctaaaagttacaaattacactatataatcgattaaattattttgtaatcaattaaagtagaaaacatatattttctatttaagtaattgattaaatcagcaaagtgatttttcatatgaagcctaagtaatcgattatgttttgtggtaatcgactatatagcaaggcttaaaaacatgattaactatgtaatcgtttacaattcttaagtaatctattaaattcattaacaaagcagttttatttcaaacaagtatcaaataatcgattatcccgataggtaatcgattacaatgttcataaaatattttccagattgaataaagaacatattaatcgattattaccttaagtaatcgattaatccagtgaaacttaacatttttccaaaaatctttcgcctggattgaaaacttaaccaaattatcaaatctttgttattttctttcaaaaacatttaagtgaatgaatgaatgaatgagtgcataatatggatcaccagataaacctttctcttacacttgaatcaattataatcttcaaagcatccaagcatactgaaagctcaaaaccaaagcttgaatcatattcctccattctttatgatgctccccctatatccaacacttctgtgtgatgggattaagaagaattatactatatggatatggcatggtgaattgacagacatgcagagggggtcgcaaactgaacctcctgatgttgacatcgaagatcgattagaggatatgattcgtgatctgggacatgagtctttgatggaggatcaatgcaagctaaagagctaggactcaagcacttcaagattatatccaatctaactggtatctgttggaaaagccagtagaaagcccacaaaagtagtggaaacacaaaaggagtgttgtctattttaacaaattaaaagcatcttgtaacagattaaaagcatcttttgatacttgtaatcgattaaatcagtctgaaaaatgcaaatagctctgttttaatcgattacatgtcgaattaatggattattttggccatatatcagtttctaggatggataagagcaaaataatcgattaccaaaccaagtaattgattatgtaggttaaataatcgattacatgatcgaaataatcgattaaaccaatttttaagcttttctgcacatgtttgggaagccaaaggtcacttatggaaagcttgcacttcaagcttcatttaggcttcatttcaatttgtatgttcttacatttcagtgacatttagcttgtaatttcgtggcctatataaagtgccaaaactgaatgtaactaattttggttgatcaatacaatttctgaaaattgttgtgagagtttctctcttgttcttgttcaagaatttatgagtcttatcaatggcttcccaatgctgttgtggtgattcttcctaggcttattggaaatccttttccatggtgccattccttatcttcaccttcatccttatccttcttccatcttccattttttgcaatttaaacttctgaaatagccccaattcaatgagtgctggagcttatgtgttcttgaggtttgcttgaagcttgggttctattgcaaggtagattcaggaaaacttaatggctatgggttcaactgtatcccatcagtcatttaagcaagcacatgcccctatgtatgataaattggaaactgatttgaagaagccattgtatccagggtgcaaagtgttattgacactatcgtcaacggtgttaaatctggttaatgtcaaggccagatatgggtggagtgacaaaagcttcagttcactgcttcaggtagttcaggagatgcttccagatgaaaacacgttgtcaacaagttactatcaacctaagaagatactttgactgatgggtatgaagtatcataaaattcatgcttgtcctaatgattgcatattgtacagaaatgaatttgaagaaatgcataaatgccctaggtgtggggtatcacgatacaaagtgaaggacgatgatgactgtagcagtgatgaaagcacaaagaaaggtcccccgcgaaggtgttgtggtatcttccaatcattccaaggtttaagcgtctatttgctaacgaagatgatgtgaaagaccttacatggcatgcagatgggagacactgtcatggattgctctgccatccggtagattcctccaagtggaagaagattgatcgtttgtatccgaaattcaacaaagacccaagaaatcttaggcttgcactttccaatgatagaatgaatccctacgacattttaagtactcagcatagtttgtggcctgttttgctagtcatttacaacttgcctccttggttgtgcatgaagagaaaatacatgatgatgtctatgatgatattgggcctaagacagccaggaaatgatattgatgtttatcttagtctgttgattgaagacttaacaaacttgtgggcgagggggttgccctgtttgatgggtctcgaaaggagacatttaagttgtgtgtaatgctattttgtaccattaatgattttccagcgtacgggaatttgagtagatacagtgttaaggaccatcgtgcatgccctatctgtgaacatgacacgagctgcgtatgtaacaccccgtaggcctccgacgtgttatcattaataatatcaaattagcgcatataacatgtttcaaacatcagcggaagcatataatcattttcttgatacattatgtatggaatcataaataactcatatcacaaatacactagagccataattcacgcccctgctgatccagtttctcaaatcaaacatcataaagacaaataactacaaaactcaggcatattgtcacatgtacaacaaatatatattcaggggaaatctcatatacatatcattaagttctgcacaagatatacatctcagtttcacaccacactatggtgctacaaaagaatatcaaccctcagcaggggtatacagaactatacatcagatacataatcaaaatagagccttcaagctctccatgctgctactcagtcaaatagtctagtctctgatgggcctcttgccctgagactgctcttctcttccagaaagatcacctgaaaccacataaaccccacacggggtgagatagcatatctcagtaagctcagggtccatggaggaatctcctccaccctggcccactatcaaatgtagacaacaagtatcgtaagcaaatggcccaccggcctagccctctggctcttacaacatcatcacatatcatacaaacgtggctaaacatagcagattaggaggaatagccatctcctgtaataatgccacggaataggaggaatagccgtctccagtgtgaggccggaactcacacctgtgtcatcccattgggtgctacccctttccatggatgcacaatatatggtacctccgagaatagaaggaatagtcgtctcctattcccttggcctagggaatcatcatcaccccgggatcatcatcacccaagagccagccatactaggaggaattgccatctcctagggaggtccatatctatctattggctaatagatctatctcaaacacaatcacaacacaatccaagcacagaggcatacatatatcatcacaagaatgcaagtatccatgcatgcaatatgaaatgaccacaactccccccggagtgtgatgtggcacacaagatgggaatcaatccccaggaacactgaacttacctggcacaatatcactctgtggtctggtccctgctctgtggctcccgccaccaataatctcagaatcaacgcctattcaaggcacatgcaatttcacatcaatatcaagccaacaggcatcaatcacagatcaaacatattagaattcccctatcctagggttcagtcacactcagccccacacaaggctggtcatagaccattcaaggtccctcaaggctgaatgccaagtctctaagtcatctgaactcaaaacacaacatacatggcatagtttcctcagccttaacctcaattatcactagaacggactgagttccactcaaagtctcgttcaactagccacttgggcttagcacaacacaatcaaggctctagcctatctgtgaactatcaacaagtgactctacacaagtcacataggcatatacagagccaagattcaaattcatcagaatcaaaaactgaaagctattccttcatctattcatcgctctgaacacatctctcaacaggaccctaggctaattctagccccagctaatatgggtcactattcataaaacccccccaggatcaaaattaaacggagaaacttgagtttcttacctcagggatgactcaaaagacctcaggacagcttcctcaagctctagcgtcctttatacgatgtgggtcttcgccaatctcaagttctctgaggtttctcccttgagaattcacttctcactcaaaaggggtttcaagagcaaagaatgaaggatttaaagctttctatggttcctcaccaatctaaaggtcatcaggaagtgtttaggctagtatatagggtctagggaagcttggaactgctctaatggaggtccaaggtcgtggataagaagagggaatagtgtttcccttcaaaaacgtgattgcccttaaatatacagcctgcccgaggtccggcgcgatccgcgccacaatggcggtgatccggcgctaacagcgccaaccccgcggcatcagcgccaacttcccgagacctgtggtgccacccgcgccacctctggcgccatccgcgtgaaaatccagagaaaactgattttctaggccacttaccgcactgaccgcgtaacctatggcgtgactcgcgctggctggaaaccattgacgcccctagcgtcagcttccagtgggtctggcgcgatccgcgccagccctggcgccatccgcgcggcacccttaacagggttttctcatggcgccaagaatgagggtccttacagcgtacaacttaaacatggaagaaaaacaatttacactcaccatcgacgttttctaaaaccttatcacccttatcgactattgaaaaagcatttaatgaaagtcaacagcacgaaactgcagtgatttcgttaaccggtgagcaggttcttgagcgggttgaggacatccatactgcatttggaaagaccaacaagaagctgaaaggtaatacttgcatatggaaaaagaggtcgatattgtctagtcttccatactggtctgatctagatgttagacattgtatcgatgttatgcatgtggagaaaaatgtgtgtgatagtgtcatcgacacacatcttaacattcaaagcaagacataggacggtttgaacactcgtcaagatcttgttgagataggtatacataagcagttatatcctaggtcagatggtaagaaaatatacttgcctccagcgtgtcacactttgtcaagaaaggaaaagataagtctttgttagtgtctgagctgagtgaaagtgtcatagggatactcttcaaatattaagagccttgtgtaggtcaaggatttgaaactaattggcttaaagtctcatgattgccagtcttaatgcaacaactgttagccgtggcaatttgagacattttgcctaacaaagtgaagcatgctataactcgcctgtgcttttttttcaatgccatttgtagcaaagtcgtggaccctgtaaagttaaatgacttgaaagaagaggcgacagttatcttgtgtcaattgcatatgtattttcctccttcgtttttcgacataatggttcatttgttcatctggtcagggaaattaaattgtgtggtcccgtttatttacagtggatgtacccggtcgagcgatacatgaagatcttgaaagggtatacaaagaatctacactgtcctgaagcatccatagttgaaaggtacaattgcagaagaagttgtagaattttgttcagagtaccttgaaaaggaaaaacctgttgggtttcccgaggctcgacatgatgacagagtcacaggtaacggttcacaagggctgcatgttataacacctggtttacaggaattacaacaagctcatttgtatgtcctgaataacagaaatgaagtcttgccatacatagtttgtcatgaagtcttagtcaaggaaagtaatccaataatgacgaagaataggttgttgaaagagcataacaagactttcctgaattggtttaaagatacaatatttagtgatgtatcttcctctgaaacaatgaggaagttagcagataggcctaaaagaaatgttagaagttggcagggatacgatatcaacaagtactcattctatacaaaacaacaagatgacaagagcacaatgcaaaacagtgggggttagccttagggctgagtcataacacttcgctactgtgcatgaacacaatccatgttttgcgtgcatgccttactttggagtcattgatgacatatgggagcttaattatgttaaattcacagtgtgtgttttcaagtttaagtgggttgatatcaatagcggtgtgcgaaacgagtattcaggatttactttggtagatcttaataagctagcttatcaaaatgaacctttcatcatggcaaaacaagctaacaggtgttttatgttcaagatccctatgatgaaaggtggccagtggtactacatgaaaaaaccattggtattaatcttgatgatgatgattaaacccttgatactggtgtcacttaattctcgacacaagtgcctaacgtcaatagagaagatgaagttgacgacgttcatgcaaattgtaatgatcatgatgaaggagaattaataaacatcatttaacataatgtttattttatattaacttgtttcgacttttacaatttcataagtaaccttacttttcacttaactttacttatttttgtttttaacaggatcatgactacaccaccgagctcccctcctcgtcctaagtcagcacctcctcgtcctgagtcagcacctccttgtcctgagtcatcacctttgttgtctacggcaaagaagacttggaaagcaacacggatgaggtcagtggctaccagacctgccggtgctgatagaccagtggttcatgtggatcctgccactgggaaggctgatagtcctcatgcaaagaaattgaggacgtatctagggatcgtggctcgagacaaggtggatgtcaccaaagcaactcagatctgacctcaaaatgggctttagcacaaggcaaggacgacaatgccgacattgtctgtgacaaatatggtagcagtaagaaaaagtggtattgattctgtgagagtcgtagagccgcttcatgggacgttagttgagttgctttgttttagaatttcataattatggagtctttcaaacgtatctttttgacatctatctgtgtaattcttacagggtgttataaagaaggctcagccattcagaagctaaacattgtccctcatgtgttgtcttgcgggggttatgatttgttagaacagagattggtggaggaaaaacaaaatatgccattggaggaagcagtccaaggtgaaagcattgagaccatcgttcatcctccgtcccttgttagatggcacgtgaagtggaagctggctcgcacaaaaaaaaaaaaatcagacaaatgacatttgaggcggcacgtcagattgcaaagaggattgtaagtcaaaggatggtttcattggtcattaatgaatttttgcctaaaaaattacaaaactaattttctacttattttgattgcagtataccctggatgagcaatcgacacaaggtagctttgtcgccaatggacgtcaggatgtcctgactgctgccattggacgaccagagcacctaggtcgtgtctatatcaacctctcgtaagtctaagtccatgaaccctaaggccttggataaacttaaacagaacatcagggaagagctagagcaatcaatcactgagaaagtgacacaacaattgatgatgtccttcaaccaaatgtagtcccagatgcagtctattgtccagtctcagggtatgatgccacctctgacggttgaggttagtccttatggtgcccgtgtcagcaccaaggaaagttgtgtcaatccctcggggaatgagccagacacgggtgtatctaacaggcgtgggttgtatgtcgatgacaatcctccccgcctggttgccctcggaagattttttgaggggtcgacaactgtgcacgacgtccctcttgccaatgatcaggtcaaggtgggtgttgaggaagttcgagatgttgatgctcgcatccctgtacccactaaagaggttcagttagtggggtaggcctttaacaccttccttgattagccgacacatcttgtacagcctattttgaaaaaggtatttcatttttggcttgtttattatcatttaagaatgatttttctcatataaagtgaagacggtcgttcacttatgtttcttccaaggatgaatttgtctcagccctatgttcatgatgtcaagataacagagcatccatcttcctaatcataagagattcaaaagggatgtactgttgttgggtagggccttcttcagcttcagcttcctctttcttttcagcagtttctccttcagcatcttcagcttgaggcagctatccaaccatctgccaaccttgaggtgtcttcaccaatccaagcttttgcagatgctttgtctttatgagattggtgatgtcagttatgttgtcaacaatctcatttgagacatcaattttaaaataatcaataaacctagagatcaacacaggataaggaaagttatagctgatcaatctagaggccttccgcattgtctcaacaaatacaagcacccaattgatttggatagaagttttgatgccatacattagttgtaagtcatcgtcagtagcttgagcatggtttgtggacctaggagtcaaaatatatgtaatgatatagtgaagaagcttatctttacttgttatactgccaactctaggcctcagcttcagcctaacttgagggtcttgaagcatccctctataggtgtcaattttgttgtacccaccagtcacctcatcaaatctccttacaccaacaggagaaataccagcaacaacagcccagacctctttatcaataatcataggaacacccttcacttgagagcgaattaccccatccatgttgggctttatacatgtgtaaaataccttcaccaactcagggtagaaagtacccttaagctcaagaaattttcttaagccttgaatttcaagaagatcagggaattgaaatccctctttgatgaactagttgaggttgagatactttgggggcataaccaactttgtagcattgaattggatatagttcatcctatccttttcttcggggaaccagaaattcactttgttcctaaaaggatttgatgattccccagtctttctttttccagttttgattttctgagaggtagacatggtatttaggattaaaatagatagatggtcggaatttgggataaaataaagaggaagaaagcttagaaaacacaacaagcacagagagaagagaatgaattcaagggtgaatttccctttagtgaaatgttgtatatataggagtttctaggactcgaattttgaatggatataacagctatttcgagtacccagtgttttaaatgttctgaagaaatttgaattttgaattttaaaagtagatatgacagtttagatttccaagaaatcttcagagattgtagaaatgccataagtaatcgattacgaactacatgtaatctattaatccgtaatcagatagagaaatgttcaatggtgtaatcgattaaattgatatgtaatcgattacatcagtgagagtataaactagaatagcatacagtaatcaattaccatagtttgtgatcgattaatccagggaggtttaaaatttagaaaggcttcatatcaaatgtaatcgattaattcgatgaagtaatcgattacttcagagacttaattttgaaatcatatcagacaatcagtgatcgattatttcattgaggtaattgattacataagcacaactttgttagtaaaaaaagcttttaatgtacaaataattgattattttgatgcttaatcgattattatagtccatactgcagaatgaacagtgattatgcaacatattttgaattttgaagcacatgaaatgaatagccaaataagattcaatatcatataaacaagcacataacaagcatgctaacatatgttagactcatcaaggatacctagcatgtttcgaaatgtatagaatctatctctagccaagggtttagtggatatatcaggcaattgattatgtgtatcaataaactcaattttgatgttacccttttggatgtgatccctgaggaaatgatgccttatctcaatgtgtttcgtccttagtgcattattggatttttggatatgttgatggcacttgtgttgtcacaaagtaagggtatttcatgtaattctacaccaaaatcttgtagttgttgcttcaaccaaaggctttgagcacaacagcttctagtaaagatgtactcagcttcagtagttgatagagcaacacaagattgtttcttgcagtgccatgagattagtgagctgcctaataggtggcaagtttcactagtactttttctatccagtttgcaccctgcaaagtcaaagtcagaatatccaattaagttgaataatgcacctttgggataccaaagaccaactctttgtgttgatttgagatatttgatgattcttttgactgcatgaggtgtgattctttgggatttgcttgatatcttgcacacaaacacacactcaacatgatatctggtctacttgtagtcaaatataataaggatccaatcattcctctgtattttgactcatcaacctttttccctttttcatcagaatcaagataggttgatgtttccattggagttgcagcatccttgcttttctccatttcaaacttcttgatcacttcaaggcagtacttggtttgatttagaaatgtcccattcttcatttgcttcacttgaagtccaaaaaagaatgtcaattccctcatcatagacatctcaaactcattctgcatagaaatagaaaattctttgcacaaagattgattagttgaaccaaaaattatatcatcaacatatacttgaaccaataagataatgctatgtttttttatgaacaatattttatcaacatgtcctcttatgaaagattggctaagtaggaagttactcaatctttcataccaagaccttggagcttgtttcaatccataaagagctttttccagtttaaaaacgtggtttggatatttgaaatctgtaaaccaggaggttgctcaacatagatttcctcctcaatatattcatttaagaaagcacttttaacatccatttgaaacagtttaaaatccattaaacatgcatatgcaagtagtaacctaatggcttccaaccttgctactggagcataggtctcctcatagtctatgccttcctcttggttgtaaccttttgcaactaatctagctttgtttctgattatgataccactctcatcaagtttgtttctaaaaatccacttagtttcaataggtttgagagaagaggtttaggaacaagttccaaaacttcatttctctttaattgattcagttcatcatgcatggcatgcattcaatgttatcaatgctcttaggttctatttgtaaaacaaaagccatattacaacaaagatttcttaatgaagatctagtagatactcccttagtaacttcaccaattatattgtcaaaggagagatctcttgtagttctccaattctttgactcttggattggtgttgattgtttcatttcaacaatgggttcttccttttctattttcattgatccattaagttgtataaactcttctaaaggacctgcatcattttcacacttcttttcctatttggagggattagattcatcacaaataacatgaactgattcttccatgcataaagttcttttattgaaaactctatatgatttactttgtaatgaatatccaaggaagatgacttcatcagctttagcatcaaatttgccaagtgagtccttaccattgtttaatacaaaatacttgcagccaaatgctcttaagtgagaaatgtttggttttttacctttatatagttcataaggagttttcttcaaaataggccttattagtaatctattcaaagtgtagcaaactatacttacagcatcaacccaaaaatgtttacgcaaatttgtctcattaagaagagttcttgcaccttcttcagggatctatttctcctttccacaacaccattgaaaaattatggttgattcccttttcttcacagaatttttcaaaatgctcattctggaattctccaccatgatcacttcttattaagataattttgcttcccttttcattttcattttgagcatgtttggccaattttctgaaagcattgaaagcatcactcttagatcttaaaaacaaagtccatgtgaatctagagtaatcatcaacaataacaagcccatacaaattacctcccaaactcatagttctagaaggaccaaacaaattcatgggaagtaattcaaggggtcttgaagtagaaacaacattttttactttgaaaagaattctttgtttgtttccccttttgacaagcatcacatagtttgtccttttcaaactttagtttgggtaagccaatgactaagtcttttcttataagcttgttcatatgatgcatgttaatgtgacttgcccttctatgccattgccaagattcatcaactttacttattaggcaattagtgttgtgaatgaatgcatgatctatagagagtaaatagatattaccttttcttttacctatatgaatcacctcactggtttgaccatcatatatcatacagcaattgtcattgaatgaaactttgaatcctttatcacatagttggcttatacttagaagattgtgctttaaacctttcacatagacaacatttctgatcttggttttaaagttgtctcctatatttccttcaccaactatctttcctttgttattgtctccataagtgacaaatccttcatatttaagagtcaaatttgtgagcattgatatgtcacctgtcatgtatctaaagcatccactgtcaagataccataatgatgatttttctcttagacacacttgcaaaattcaaatcaatttacaaaggaaggtacccaattgaggttgggtctataggggttagctattttctttttctttggcacccaaatgcaatctccatgtggcacatagaatctcctagcatagcacttattagatatgtgacctttctccatgcaatagttacaagttacagcttttgatgctcttttaaaatgagtcaaatgattaaactttgtttttgaagcagctttttgatttttctgttttggaggtaaaaacctagttttttcgaaagattttgatctatgtttgtaacccaacccagaagtatctccagcatatttttgtacacttagcatttcagctaaattgcattttcctttataaagcatttcaaaagatcaactaggtaattattttctgaaagtaataacatctgtttttcaccttgactctttttaaactcatcaaactcttcttgcagagctttgcatttgtcaacatttgatgaagaagaagcacatacacatccattcattttgtagcttgaaacaagcttttcattttcttctttcaagttacaaatttcaatttgcatttttgcaagttttgtgacatgccatctaagatttccttttagcctattattggattttgcaatcttttgagcctcttcatgtatttcatggaaaggatcaacaacttgatcaaattcagaatttacctctgtttcaacacttgataagtcatcatcttcacttattgtggaggtgaaacatacatttgcttcttcattctcacttgatgatttagaagttgttgactaattgtcttcccatgctatataggctctcttaggctttccttctttctttgtcttcttttcacttaattgctttttcaaaaagatagaacattcagatttaacgtggccaagcttaccacattcaaagcaagtgaaatttgtgttgttgttgttgttgtcactcattttgttgttgttgttgttgttgaactttgtgaactttctattcttgtttcttctcatgaaacttgctgaactttttgacagttagattcatgttgtcatcaccatcttcttcacttgagtcttcttcattgtccaccttagaggatgcagctttcaaggctatgcttttttgtttcttgtttgcatcttctgcatgtgttagttgtaacatttcaagttcatactcaagaagcttaccaaaaaatgcagccataggcatcttgcatagatcttttgattctttgattgttgtcacatttggtgccatggtcttatgaggcacttcaagattttgatgttcaactcttcagcatcaaaaatcttcccaagaccaagaagatggtttattatgtgagtgaatcttgtttggagctgagatatgttttctgtagtgttcatcttgaacatttcatactcattgatcaaggcacgcttccttgatcttcttacttcatttgtaccttcatgagttacttccaacatctcccacatctcctttgcacttttgcacctaaaagttctaaaaaattcatcagaagaaagtgcaaaagtaatcatgttcttagctttgaaatcatactgaacaactctcttttcaacatctgtcatttcatcccattctttgggaatcatatcattaccagtagtttttataggaatcaaagaacctttttctattgcatttcaagcacctggttcatttgattgaatgaagattttcattctattttttcaaaaactgaaatgctctccttcaaacatcagaggacgattgagggaggcacccttcttgaaggtaatttgtgtggtatttgatagagtgattttaattaaatttttatctatcattcttagcttgttttacctcttttggacttttattttcccattctaattcagtttttagcctaggcaagtaagtgggcttaattgttaattgttgcatatttttggatttttgctcacttaacgtatctgacttgtgcaggacctatagagtgctaccaatctccgaatggagcgttctaggagtccttggaaagataacgaagttttctagaaatagcccaaggccaattctgtcattttgagggtcattttgagcttcgaagttagcacctctgcacttgtaattttgggctacgaatttgattttcatggttgtaaatagtaaataattagattgttgggtttgtttatgacccattctattttcagaacttagtcactaatatattagtgactttagtgaaaacttgaacagcacactttacaattcaataaacaagttttatatttctttctttagtttttagaatcaaaagcttgttcttcatttctctcatttgttcttcattgttcttcatcttcttcatttccattttgctattcttccatttttctgcactcatttcatggggctttccttggtgatcattatggaaggctaaatcattaatcaatccaaggatctaactcgagcaagagaagaattggagttctggttcagtatttcgaattctacttgaatgttcaccttcttcttcaatttctattatgttttcatgattatgaatgcatttagaattgaaagtgaattaggattatggattcatgtcttaaatttcaattgataatcacaagattaattgaatgatatttcagttagggttgtggtttcaatcaatttaggagtagaatcgattgaactgcttctattgagattgaatgaatgttcatgatagaatcaatttatgggaatgatgatgattcaaatagcttgggttagtgaattggattgatgctttctaatctgttttactttactccttgataatcttgttaatttttgcattgttctttaattttagtttgtgttattgcatgttttactttacgcataccaactgtttgacaaaatctccccttattattaccaatgatttgaagctagaaccatattgatcatgtctctgagtcgacctaggttagctctgtgctacagaattagcttagtaaaattgtttttgatgcgtctcgacaaagcaatatcaatattcattttctttttaaagaaagatagtgatcttgaataacactcaagaacctgctcttgataccaattgaaaacaataagaatacacacaataaccaagaggggggtgaattgatttaaacttggtcttttttattctttagaaaatcagagttaaaggatctttatcacaattaaaacaagaatgcctcgaatcaatcaaaccactcatcccaagaaaacaattgataaaacttaacttgttgaataataaagattccaccaagaatcacagatcaagatagcaagtagagattgaagaatagagatcaacacaagaatttatactagttcacttctcaagtgaagctacatccagttcttctaatcaacactaggttagagttccactattcacaaatttcagttcttacaagctttacaacaatcactttttatcaaacctagataaagaacagaaatctaaaaccctattagactcctaatgatcaagccatagagaactcttctctactcttctctctagagaaacccactctagaaaaagcttcaagaattctttgcaatagttacaaaaaacctagaattcagaaacaaatttacaacaagagttaatggagagagacaacctgatgatccaatgaatatgaatgaatatgatttgccaatcagtgttgaaatgaaaaacaagtttcaaaactttctctccaaaggcttctttgaaatatttcccaagaaatctttcaatataccatgaagatttaaaaatgtgggacaagaactatctaactcagaagaaatttactcactttcagaaggcttatcaatactttgaaaaattgaattcaagagatgtgagttttagaaaaactcacaatctatttatagccaacttctgtaactaaatgtaatagactaaatcgccaatgtaatcgattaaattatcatatgtaatcgattaatattccaggtaatcaattaaagtgtttttagctcaatctggaaatgttcaatgaacaatgtaaacgattaacacgagttgtaatcgattaaaacagtcaagttcagttttgaaataagcctatgtaatctattacgattgagtggtaatcgactaaggcagtcatgcatatttagaaatgaacttatgtaatcgattacagtagcgtggtaatcgattaagacaaatagttatgattttcattttgtgctatgtaatcgattaagattagctagtaatcgattaaagtgttcttaatgacttttccataatttaaacataagctggtaatcgattatatcctattgatttaagggggagctacttgaagattgatgcaacttgaagacatggaagtgttttgactttcaacatgcttgaaggcttgaagatgaagattgtgattaaatgtaaaaggaaagaaagctttctgttgatccaagtccttgcatgcataccattcatattcatttaagcattacatcacaaaagctttaagtaattttttttggaacttaaaagaagctaagtggtttggaaaaatagccttaagctggtttaatcgattaatacacacaaagaatcgattacgttgttcttcaagctttctggaaaattatcaagaacaatttaatcgattacatcatcggattaatcaattgtttcaaacttagtatacatatgatctggctgagtaaatagattaatcgattaccattgattcgtaatcgattacatgcctatttagaaaaagtggtcatttaatcaattaccacttatcgtaatcgattatttagttcatttcatgttttacacttagtctgtcttaatcgattaccatttgttgtaatcgattacattattcaaacatgacttttcactttgtctgctttaatcgattatcgattattgtaatcgattactcaatgcaaaatgattttagaggacttctagagtaatcgattacaagtcaggataatcgattaaatgacccgttgctgtaacccagatcttgttatgaacggtttaatcgattacaggagcgtgtgtaatcgattacatatgctaaacaatcgattactggagcgcttttaatcgattaattcagttacataatttagtataaatagaacccatgccttttctgaaaagaaggatgtagaacttgaattttcgaacactgagcattctaaaagctttctaagcattcacaaaggctttcttctgggttcttaggctcttgcttccattgattctcatatggtcattaggatttagtgaagcaaggcaattcttctcaaagtttaaggaaaggcttgttctgcatattgtttctacattcgacctagtattttcatcattatgtatatcattcttggatcattaggtgaattctttccttactctttgtggttgtaaactttctgttgaatctttgatttttgaagttctattgtaagtgggtttcttgcaaagttagagatagtgtttctctacgaacagctgagtagtattctcagtgtgggttttggcttctaaggatctaatagtattttagacttctgaactttatctagggttgataaagagaagcttttaattgtcttgtaagaatattatttgcaatagtggaactctactctagtgtttagtagaagaaaattggatgtagcttcatagtgtttgaagtgaaccagtataattcttgtgtgttcatttatgttctgcatatttgattgttttctttgtgaattctgttttatatcttgtttcttgaagtattacaagtcttgggttgatcttggataaaagttcttggttgtatttgtgataaagatccaaaaagggcaaaaactctgattttgattatccaaaaagttttaaattaccaagactaaccaattcaccgcccccccccctcttggttaagtgtgaagtgttcctgatgtgttgcaaacacatctagtttttagtatagttttaggatagatttcaattaaatatgaaggaaatagaatagaattaagttagtttagtattttaattgctttgaattaatttaaataccatttaagcattttgcaggcaaaaaggaggaaactcaagcaaatgaagaaaaccaagtctgaagtcccacgctattagcgtggtaattcaagctatcagcgccaaatgcagggaatgaagattgagctctcgaatgctccacgctactagcgtggtaactcacgccatcagcgtgaagaagatgaaaccaggctaattgactcgaccagttcacgctattagcgtgacatccacgccatcagcatgagagaagcctggaacaaacctaaagactcgaagaactcacgctaatagcgtgagggtccacgctagtagcgccacacttttgaaagacccacgcgattagcgtggaatcgcgcgctgatcgcgtggttgtgattttgtttcctgttttaaaagattggtttcgcgattaggtttattttttggctttcttaccttaattaaacattattataaatatgaggcctctgagtacctgagaggacactgagaatcagatagtaacagttttggtattagtttacttagccattagagaaatcacactcctaggaattaagactccaagccaattttctgcacaactatgaattgtattattgctttggtgttcttgaggcctatggtaggctaaatctttcattgtgggaaggccatgaactgatgagttaacctctgtaatttgactggtattgaaatatatgttttgcttgttttaattcttttctgttctttattttatcttgattggaattgatcacttcgattaagtattgaggggtaggattcgcaatgggaacgttggggttctactttctgacctgttaagaataaaattcattcttcgcctaggaatagggatgtgtgagtgcggaggctataatatgttctttacatgcttaaactgatagatttcactaaggaattaggttttcaatgcagtttaaagggttggttcgctaaggaattaggaattaactattatagaaaagacttattctccgagcaatcaaaacaagaacccatatgatttgttctcttaatgcttaatttgacagaatcgctaagggtttagggttctcgatcgaattaaagggtgaaatcactagttatctagggtttgcaaatttagtagagatttatcatatgtatgctttaagataacaatccagtcaagtgaaagttgcgatactcagaagggagtgtgcctgaccacaatctctctctacttgtaacattcttattactcttactgcactttacttttctgctctttgctctttttccaatacaacattcaacaaactcttctcttgtcactttccgttttcaatcacatttatctattattgctgtagaattaccccaatccctgtggagacgataactcacttacctactctattacttgttaacgatcggtgcacttgccgtaatcacacaacagttcccataattaacaattggcatcaagagctaggtcttgtaagatattcaagatcatttttttttcaaaatgaatacttaacaaataaccttcaaggaaagtgcatctttgaatagacctcctttgtttgagggggagcattttggcttttggaaaaatagaatgaagatctttatccaatccaatgatccaggagcatggaatgctattgaaaaaggtcctagagtgtgataagtgccacattttagtgaaaataggattcaaatatggcacttatccgttattttaattgatttagtcacaagataaccctagaaacctagtcaaatgatgattatgtaaaggtaagtcatgctttcatgtttcgaaaagattttgtccaaattaattggttcaattttgctaggtctgaaggttacgaaagaaccaagcttgcgaaactaggagcatggagtgaactaagtaaaggaagaagcctcaaacagcaaaccaagcccaacaagcaccaagacccaacaattccttcatgactaagctttaactcgcctgggcgaccaattcatgcttatttcactcgcctgggcgagcacaagtccccaggaaccgccattatctcgcccaggcgccccatttatgaaggatttggtggcctgggcaagtgaagcatgctagtgcccaaaatctataaataggccacggtttggagagctttggcatcacattttgggagttcttcctcccttagtagcttagggcttgttcttaggtgttaggctcttaaatagtaggtttaagtaggttaagaaagtgatagaagtgaggtttagtgtggaagctctgccggagaaaagcgaggatgagaacgttcagcagctctttcagagaggatgttctctccatgctgggctagcttcttagaggttggatgtaatcttcttaaccctatacttcttttaatattcatgcatgagtcgttctatttcttattggtagtttcgttctgcacttaatgcttgatcctacttgatcactagtatcacgaacttaaatccgaagtgagcttggaaagtaatcttaggatttgaactgaatgaaattactcgttacgttacgttgctaggaatagggcataatgtttcgattgcataaaaagcacgcgattatagttcttaatgctggggtaatttacttaaatatgcgagggatcgatgtttggtaaaatatccttagaacttggatgcgaggaatcgattcaaggtaacttagtgtgcatcaataaagaatagacgatgatttatgcatgataaatattaactgaatatagaacgttaagaatgatgaaatccaatccctctttctcataaatatattttcatttctgttaagtttagatattttactttacctgcatcaacaaatgaaatatctttcgacctacttgtacatatctattcaactgtttaattttagttggattaactgggtaagctcaagtccctgtggagacgatcttataaattcgaaacttacaacgatagaatgatacgcttgccgtggtgaaaatccttaacagagtgcctattaaagtagtagataataacatgatcccaaagattgggatgaaatgaatgatgatgaaaagagaattgttcagtgtgattttaaagcaaagaacatgataacctctgctctgtcttctgatgaatttttcagaaccgttcgatgcgcaagtgccaaggagaagtgggagatgcttgaaatcacccatgaagggactgaggaagtaaggagatcaaggaagcattccttgatacattaatatgaactgtttaagatgaatcagaatgagagtatttcccagcttcaaacaaggttcacacatatagtgaatcacctcttgggacttggcacaacatttgatgctgaagaacttaacatcaagattctgaaatgcctcactagagcttggcaacccaaaataacagccatcaaggaatctaaagacctttcaaaaatgacaatggctacactctttggtaagttgcttgaatatgagtttgaattgtctcaattaacttttggtgaagatgcagaaagaaaaagcaagggaatatcactgaaatctgtagcacccaaagtggagaaagatgaaaactctagtgatgaagatgaagatgaaagcatgaacttgattgtaaagacgttcagcaaatttttgaagaagaacaagggcagaaagtttgcaagaaacaacaagaacaattctacaaacaacagcacaagcaacttcaagaaggtggacaacaactatacctattttgaatgtggcaaacttggtcacattaaatcagaatgctccatatacttgaagaaatagcaacaagacagcaaaggcaagaaggaagctaagcctagaagagcatacattgcatgggaagacaatgaatcttcaacctctgaatcctctgctgaaatggaagaagccaacatgtgcctcacctcaatcatcaatgatgaaaatgatgatcttttggatgaagatgaggaggtaacttttgaacttgatcaagccattttagcttttcaagaaatgcataaagaggccaaaaagctggctaagtccaatagtaagcttaaaaagagtatggaggatcatcttgctaaaataatggagttacaaactgaagtttgcaacttgaagaaagaaaatgaaaatctaacttcaagttacaaatcaagtggatgtatgtgtacctcttcctctacatctagtgacaaatatgagatgctgcaaaaagtgtttgatgaatatagaaacaatcaagaagaaaagtatttgcagttggtttcaaagaaccaagaactgattgacatcttggaaatgctcaacaagggaaaatatgatttagatgaaatgttgagtgcccaaaaacagtttggagatacttcttgtttggggtataaaaagagctttaaaaatgtccaaaagactgcatttgtacctccaaaacagaagcaaaagaaaaagcaaagagtcaatcaaagaaggttttccagaaaaacatataatgttgtaacttgtcactattatatggaaaggggtcacacagcctaccattgttttgcgaaaaggttttatgtcccaaatggtgaatgcatttgggtagaaaagaaaaagaaaacagctaacccacttggacccaaaatcaaatgggtacctcttcctttgaagtaatttgtttcttttgtaggtgtgtctaagagcaagctcttctctatggtatcttgatagtggatgctcaagacacatgaccggtgacatgtccttgctcaagaatctcacttttaaagatgggggctttatcacatatggagataacaacaaaggaaagatcatgggtgaaggaagcattggtgatagcttgaatactaaaatcagcaatgtactctatgtgggaggcttgaagcacaacttacttagcattagtcaattatgtgacaaaggctacaagatttcctttaatcaagattgttgtttaatttgtgatggtaagagtgaagaggtaattcaaataggcaaaaagaaaggtaatgtttacttgctttctattggtcatgcattatttcacagaaccacatgcttattgagttcaatagatgaaacatggcagtggcataggagaactagtcatattaataggcatcatatgaataagctcatcaagaaggacttagtcattggcttgccaaaactcaaatttgagaaggacaaattgtgtgatgcatgtcaaaaggggaaacaaacaaaaatattttttcaaagcaaaaacattgtttccacctctagaccacttgagcttttacacatggatttatttggtccttcaagaactatgagtttaggggtcaattactatggattagttattgttgacgatttctctagattcacttggactttgtttttgaaatccaaaagcgatgctttccattcttttcgaaaattagccaaacttgttcaaaatgaaaaaggatgtaaaattgtctcaattagaagtgatcttagttgagaattccaaaatgaagattttgaaaaattctatgaggaaaatgggattaaccacaattttcagctccaagaacacctcaacaaaatggtgttgtggagaggaaaaacagatcacttgaagaaggtgctaggacacttctaaatgagacaaatttacccaaatatttttgggctgatgcagtaaacactgtttgttatactttaaatagacttctcataagacctattttgaagaaaaccccttatgagttgtataaaggaagaaagcccaatgtttctcccttaagaacctttggctgtaaatgctttgttttaaataatggaaaggaatcacttgggaagtttgatgcaaaggctgatgaagccatcttccttggatattcattacaaagcaaggcatatagagttttcaataaaagaaccatgtgcatagaggaatctttccatgtaatttgtgatgaatctaacccctcaaaagaagaaaaagtttgtgatgaagatgcaggtcaaatagagcaaaatattcagcttgagaaaatgtctatcaataagaagaatgaaccaagtgttgaagaaggttcatcaacaccaaaacaaatgcctaaagagtggagaaccacaagaaatctttcactagataacatcattggtgaagtatcaaagggagtttccactagatcttcacttagaaatttatgtttgtgacatggcttttgtttttcaaattgaaccaaaagatattaatcatgctttgcaagatgaacattggatgcatgccatgcatgaagagttaaatcaatttaaaataaatgaagtttgggaacttgttcctagacctccatccattaggcctattggtacaaaatgggtttttagaaacaagctggatgaaagtggaattatagtcagaaataaagctagattggttgcaaaaggttacaaccaagaggaaggtattgactatgaggaaatttatgctccagttgcaaggttggaagctattaggctactacttgcttatgcatgcataatgggttttaaactttttcaaatggatgtcaaaagtgcattcttgaatggttatattgaggaggatatttatgttgaacaacctccaggattttctgattttcagcatcctaatcatgttttcaaacttaagaaagccctttatggtctgaaacaagcacctagatcatggtatgaaagattgagtaagtttctacttgatcaatcttttgtaaggggcaatgttgataaaaccttgtttatcaaaaggcaaaggaatgatatcttaatggttcaaatttatgttgatgatataatctttggttcaactaatcaaaagctttgtaaagaattttctacagctatgcaacatgagtttgagatgtctatgatgggagagttgacattcttcctaggattacaagtcaagcaattgaagaatggaacttttctcaatcaatctaaatattgccttgaagtaatcatgaagtttgaaatggataaaagcaaagatgttgcaattcctatggcaacttcaacctatcttgattcagatgaaaaaggaaagaaagtgaatgaatccaagtatagggggatgattggctcattactttacttgacagctagtagaccggatatcatgttaagtgtttgcttatgtgtggaaaataaggaacacttcacacttaaccaagaaggggggtgaattggttagtcttggtaaattaaaaatttcttcaatgaaaaacagagttttccaaaacaaaatcagttttatttccctttggatctttatcacaaaaccaaatgaaaaactttatccaagatcaatccaaaacttgttatgccacaagaatagactcacaaaacagcgtacacttcaagaatgatcaaaaacatagaatataaatcaagacaaaagatttatactggttcacctcaaaacctatgaggctacatccagtttcttctactcaacactagagtagagttccactattgcaaatattcttcttacaagcaattacaagcttctctccttcaaccctagaagaagttcagagatctaaaatcctattagatccttagaagccacacccacactgagaacactactcagctgtctttagagaaaccctatttcctcttgcaagaaatcccaatttacaatagaccaaaacttacaagaattcaaataacagtttacatcaacaaagacaaggaaagatatcacctgataatcctagaatgaatgcaaagtgaatgaaactcaggttgattaactgattacacagccatatgcagttctttccttatgctttgaatgaatcccaaaaccaaacctttctcacctagaaaagattccactattccctccaacaggaacatacagtgcccttgtggccatgactcttgcgattccactattctcttcaactacaccatttctgttcaatttttttctgttctcgttcttactttctagtagttataatgttctttattgtttatttttttaatctttataaattctgcgctgtaataccaatggaggaagcgcagcgaaggacgccgtggtaagggtgttgggtttagggattggttggggtttaggggttgggtattcgggtgaagggttagggttgtgtcggcaggcgtacatggtgtttgggatttagggctttgtgttgagtttagggtttggttgggatgtagggtttggtttagggtttagggtttgtctggggtttagggtttggctagggtcttgggtttagggtttaggggttgggtattcgggtgaggggttacggttgtgtcggcactaacaatttagttgatttaagagactcgggtgaggggtcacatttatttaattgaagatccttttagagcaacataattcttcaataagcttgatagaagactgatgaaggtagctgaacaacaaataacaacatattaaggcacattgctgctccaaatccaaaaaaaacttgatcttttagcatatgccaactgcaaggaaggtcttcccccttggtgccactatttggagaagcaacgaggaagaaccttttgaggtgcctttctccattacacttgacccccaacagcttctctgttcgatgtacgtgattaatgtagttcttccttgagacagaatcaagatttaaagaaacttttaaccaaccagatatattaaggctcatcttcgcaaactcttcaaacatgagcttcaagctctaaagcaaaacattgaactcactaatctggatgggtcttgggtttagggtttagggtttagggtttggctagggtcttgggtttagggtttatggtttagggttggttggggtttaggggttgggtattcaggtgaggggttagggttatgtcggcaggcgtacatggtgtttggggtttaggacgtcattcaacacgcccaccaaccctaaactatgcaaccagaatcatgaaacctaagcctaacccaaccctagcccaaacgtcacgtaccatgcccaccaaaccctaaacccttaaccgcaaaccattgtcacataccatccctcaaacgcgaacagaatcaccacttgaactcaggcttctcgtaactcaaaacaacttcaaaaatctctgaaaaaaaatgaaaatacactcgaatggtaggcatggtaggcagtttagtagagacagaacactggaagccaagatatgaaggacctgcggagctggggccttatctaccaaatctggtgctgctgcaacatgcctggatcaggcatgttgcacagcaccagatttgtaaatataggtaccctcctgcaccagatttgcaaatatttttgaaaacgcaccttatcggtaaatattttaaaaaaaaaaacacccttttggttcttttgccctaaaagcttaaccttttaagtgctacctttgatcaattcttttaatctaataaccctagatgaatgaataatgcatgacatgaaatgcacacttggattatcagatcacatactcccttttacatttaatcaaattaaacttcaatgctttccatggttctttagtctttggacatgttgaaagctcaaaacttcttgagacttgaaacttgttcatgatgcttgacttcacttgattcaacattatgtgcaagatatcaagcaaacccaaagagtctcatcttacagctgtaaagaggatcatcaatatctcaaggcaacacccaaagttgggctttggtatcctagagatgcatctataaatataattggttattcagattctgattttgcaggatgcaagcttgatagaaaaagcactagtggaatgtgtcatctccttggaagctcacttatttcttggcattgcaagaaacaagcatgtgtagctttatccactgcagaagctgagtatatttcagctggtagttgctgtgcacaaagtatatggctcaagcaacaattacaagactatggagttgatttaaaggagatcccactgctgtgtgacaacacaagtgccatcaacatttcaaagaatcatgtgatgcattcaaggaccaagcatattgagattagacatcactttataagagatcatgtgtagaaaggtaacataaaggtaaaatttattgatacacatcatcaacttgctgatatatttactaaacctctgcctaaagatagattttacactcttagaaacatgctaggaatccttgatgaaaataatatatgctagctcgtttgttacatgatttgtgtgataattagaaagccttttgccataatcattgctcaagtgtattaaaagttgtatcagatgttaaaatgctctattttctactatatgtgttgtaataatcgattaagactcggaataatcaattaatttcattaaaacggacattcagtatgaaaatcaggcttaagtaatcgattacatcaaagtcgtaatcgattactcttcataaatcaaaaattgtatcttcctgacataatagattacctatcgggttaatcgattacatcattaaaaactcaagttagaaaatgttagggtcgctgtaataatcgattaccactcgggttaatcgattaaaatgtttttatccatgtttaaattgccatccttaagcaaataatcgattacataagacatataatcgattactaatcatcttcaacctctggcaaccattattgcaatcgattacatcacggattaatcgattacactgtgtaaactttgttattttgctctggaataatcgattacttaagggtttaatcgattattcaagtttttatacattttctgacatatttctggatttcgtaaccgccctatcatctgatctttgtgccataatctccattaacttgcattaactacctataacaactatatttttcaaaaatctggtcatttggtgcttaatctttgcctataaatagtgaactattgtttcaattcctccttgcaccaaactctatcctctcttgcattcttttttgtgtctcattcttttctgtcaaaccttcaacattcctcactgtcttactcacaatgtctgcacccaaacatgttcgtactgggaaaaggaaagtgggagagtcatcatcaaaccctcaaccccaacctccacctgataggttaagcctttggttcaccaaagaagcagataaaatgaattatttgcaatttaatgctgctaaacccatttgttctcctaagtacattagcctagattggtttatccaagaaggttttgtttttcctgccctattagaaactcaaggcctcaggcgtttcatggagatgaagggtacctactaccctgatcttgttaaagtcttttacacctgtggcaaaggctctatgcaagggtacttcaaatccacagttaaaggggtggaaatgcttattacccctgagatttgggagactgttgctggggttgtaaatgatggggagagaaagtttgaggagaccccaggtggttacattaagatgggaacctatagagaatccctcactgacccaaaccaacccattgggaataggttgagcactggtcctatggcaccagaaaatagactcctacactatcttatcacctatattttgactccaagggcaaccaaccatgcccaagccactgatgaggatctataactcatgtatggtcttatcaattccattcctatgaacggggtactcattttccaagaaattatgatgaaatccaaaaggcttgttaactatccattcccacatcctgttctagtctctagattcattgaccattttggggttgatgtttctaatgaagtggtggacaacaccaactcctccaacaacctcattaaagagaagcatctgtcaaagcttggattgcacaagacccctgatggatgggtgatgggaggacagcctccacagatgcctcagcaacaggaaccatttgttgctgacagtgaagatttggctggttctgcaagtgaaggtgaccaatctgagcagccacttcactctcaatttgagtctcttatgctggccaagatggatggacttttgcagatgcacgatgactttaaggcagaagttcaaggctcattcatggagattaatgagaggctaaatggcatagaggctacactaaggatggatgaagaatctgaagaactttagaccttatttttatgtttcaatgtactctgtttttagttttctttcttaatgcaatatgtactccttaactccatattaatacaatattatgcttctatttatgcttaaatccattgtgcattacatttttgtctttaaaaagccaaatagggggagaataattgaaaatcaacatgctctgcatcatactctgtttgcccctattttttgtgcactttttgaactaaaatttcagctgcataatctggaaaagttagggggagttaagtgcttaaaatgattgcaataaacaaataaatgttaggaatgaatgctaagttaaaaacatatgcctttaacacttgttcatgcaaaggattttgaatttttcaggagctaagcaagtgcagaaaaatggtatgaagtctctccatttaatcacaagacccattgcttttcaattttaaatttggcatgtttaaagccaaaaagggggaggttgttgatttgagggggagctacttgaagattgatgcaacttgaagacttggaagtgttttgactttcaacatgcttgaaggcttgaagatgaagattatgattaaatgtaaaaggaaagaaagctttctgttgatccaagtccttgcatgcataccattcatattcatttaagcattacatcacaaaagctttaagtaattgtttttggaacttaaaagaagctaagtggtttggaaaaatagccttaagttggtttaatcgattaatacacacaaagaatcgattacgttgttcttcaagctttctggaaaattatcaagaacaatttaatcgattacatcatcagattaatcgattgtttcaaccttagtatacatatgatctggctgagtgactggattaatcgattactattgattcgtaatcgattacatgcctatttagaaaaagtggtcatttaatcgattaccacttatcgtaatcgattatttagttcatttcatgttttgcacttagtctgtcttaatcgattaccatttgttgtaatcgattacattattcaaacatgacttttcactttgtctgctttaatcgattaccggttattgtaatcgattattcagtgcaaactgattttagaggacttctggagtaatcgattaaatgacccgttgctgtaacccagatcttgttatgaacggtttaattgattataggagcgtgtgtaatcgattacatatgctaaacaatcaattactggagcgtttttaatcgattaattcagttacagaatttagtataaatagaacccatgccttttctgaaaagaaggatgaagtagaacttgaattttcgaacactgagcattctaaaagctttctaagcattcacaaaggctttcttctaggttcttaggctcttgcttccattgattctcatatggtcattaggatttagtgaagcaaggcaattcttctcaaagtttaaggaaaggcttgttctgcatattgtttctacattcgacctagtattttcatcattatgtatatcattcttggatcattaggtgaattctttccttactctttgtggttgtaaactttctgttgaatctttgatttttgaagttctattgtaagtgggtttcttgcaaagttagagatagtgtttctctacgaacagctgagtagtgttctcagtgtgggttttggcttctaaggatctaatagtattttagacttctgaactttatctagggttgataaagagaagcttttaattgtcttgtaagaatattatttgcaatagtgaaactctactctagtgtttagtagaagaaaactggatgtagcttcatagtgtttgaagtgaaccagtataattcttgtgtgttcatttatgttctgcatatttgattgttttctttgtgaattctgttttatatcttgtttcttgaagtattacaagtcttgggttgatcttggataaaagttcttggttgtatttgtgataaagatccaaaaagggcaaaaactctgattttgattatccaaaaagttttaaattaccaagactaaccaattcaccccccccccctcttggttaagtgtgaagtgttcccataattaacatatccacgtgtgatcgattaaagtagtgtaaaataaattttccaaaaacttaatgatgagaaattaatttcttttgaaaaaaaaaatgaacagctttaaagctttagtaaaaacatgtatgcatgttaatgatcatgtttatgcaatgcaagaagcataagattagcctctcataaacttaacaaattacaaattccttggcatgtgaaaagctaaaatctttcttctaaggcgcacaagcttcatccttgacttgatcttcttcctgctccccctatatccagcaggaacctattggagatcccctgtactaggtcacattgaccatcccggatcttttcctcagacccatgcaggtgttgtgggaccctactttgtctggaatgtataatgacaactttccgttggacaaaaaacacgaggatatttctgagatactccacggtggtaaatgtcccaacatcttcattatacaactgtggattctgttagtcactttcaattggctactgttacataactaattgttttatattcatgcataattgacttttttttcaaaacaatagggatatgaatgacttatgtttgcaatcggatcatgccgatgtgtatggatttatcaagccacagtccatacagagatttgggcaatatcaatttgaatctgaggactatatcaagaaatggatgcagagttcacagaaagatgtctaccttgcagcgtacttgaatggtaagtaaaaatatacaaatgaatttaaataatgtatgtagtatagattgaggtggtttggacatgttatgagacgaccactggatgctcccgtaagaacaagagtttgttaccaagagctcgacacaaagagaggtagaggtcgaccgaaacttacctggggaaaggtagttaaacaagacctaatggagtgggatatagattggcggacgacatgccttaggacggagtaaagaaaagctataaccttggtggagggttaaacccattagtagttctatgttccagtcattcccttgttttagttattttcctctttttttctcccttcttcctttcacccctttttctctcttttgtcttatttacacttttttcttcccctctccctttatctttctgtctcatttacgatttatcattggattcatctaccaccgaccccaattaacttgggttaaaggtgttgttgatgtattataataacttaatgttctccaatgcagtgcacattggcaactggtcatcatatgtcctaaggacaatcttgtcatgtgattttgttcgttgcacaacaagcctgataactacctgaaaggaattattaacaagtaggttgtaatttgtatgacatttatgttattatttctaacacatgaatatgttaattgtacaatatgcatgcatgtttctcttaagcagtgctttgaagggactccatgatactcagcgaaataaatcaaaggctactactaaatggattgcggttaaagtaagtcatttaaataatgttttatgtattcaaaataacttttattactatttacactaatttccgtttaactttgactatgttattgaatttagtgtaataagcaaaaaggaagcactgaatgtggctattatgtcaacattggatgtcgataatagtccaaggaggctttggggataactaggacatggaaaactaattgtattttttatacttatttttatttatacttattaaattatgttttattatgtcatgtagtattttactgatcagagaccactggaagccgagagattgaaggctattagggtttagtggctacattttatcttaaagttagggatgaaatattagattaggtggttaagggttaaacaattgtataaaaacttggttaggaaatcatttttatgtacattgacactattaaatttactttttattcaaatattatttaattttattgtattctgaaattggctagtgtctagtatttcatttgcaggatgaatttgggtaaaataaaaaaaaaacacaatattttaaaaaagaattaaaaaagaacaacggttcttgttaaaaactgatgttaacttatattacaacatcgattttcagtcaaaaatcgatgttgttacatgatagcaacatcaattttctaatgaaaactgatgtccctatatatgtaacaacatcagttttgacctgaaaatcgatgttacattacagcaacatcgatttttattcaaaaccgatgttgctgtgatgtaacaacatcgatttcaatataaaaccaatgttcttaaatcacagcaacatcaattttcattaaaaattgatgttgtaaaataagttaacatcatttttacaaaaaacgatgttgaattatcagattttacatttttttcttttgtttcttatatggtgacatcgatttttacaaaaaaactgatgttgtataatttggttaacatcggtttatcaaaaccgatgttaacgtccaaactttctacgtcggtagtttcaacatcggttttgaatgttatttttctagtagtggaatcaagagcttcccaacatgtgtgtcgcaaccatagtgcttgctcgtcatcgttctctcccgctatcgttggttgtgagtgggtgagagacgacattatgaaatatcagtgttctgtcacctcggcggcaagtgttgacactctgcgttgtcaacttaggttgacaaaacctgaggattcctgacgggtggccgttaaggcctgcgagaatgatgactttcctttcttcaaagcgaccccaagttgtctgcccttcttctttatttacaggtgcctctacgaggtgctaggtttgattctgttgttgacctcctttgaatgtgctttgcttgagcacttgaacgtagtcccctcctaacttcatcccaatagttgggccatggtgaaggcttttgaaattctctgcccatttttcaacatccgacctagtgtgtcgatgttcttgcatttcttccaaatgaagttgacaggtaggattggttgcgtctctatgaacattgtgtccaagaagctgttcgagtttaactcaaacatctttcgccgcttcaaagacggtttcttcaaggtcctcgctactaacgtcgtggctgattgattgccactgatgtttaatcgagacggggagcctcgtctcccattctactggcaatctgatctcaacatattcaagttatttgatgaggatctattgaccctggtggagagcgtggacaaggcgatcttggagcagttgttggcttcgctggacgtacgagccattttgtctttgccctagacggacaacctttgcgttgccttggacgataatttttcttgtcctgtcttcctctgtgtttagggtgttttgcccaaattaacacttattgtgttttggtaatttggtaggtataatgggagattttccctagaggcccttagtgaagcatgctagacctgacggtggggttgtgccaccttcttgctagaggcgagggtcgacccaccgctggggttggacttactggtgctgaaatcataaaggtttctcccaatatcccttcctctattatggctaataggaagcgagatgacgatgctgggacctttggccgtaagaagttgagggcctctcttagccttcatgtaatgaggccggctatcaggcttcttcccagttcgggtgaccctcttgctattattgcgcaaggttcgcctatggcatcaccgaccatccaggctatcgatgtggctcctactcttgttgttgctcttgcttctgcaactcctccctctcctgctgctcatggggtttctgctaccccttctgttgtgaccagtgtcctggtctcttctgctagccctgtcatgacccatttacctccacaactacaccttcgctaagcgttgatgttacggtttctagtgctcctaaggtgtcgtctccttctacttcagctctgcaggtttctttttctactgcatcagtgtcaatattgccttcttcttcctcttcctttcaccccagcgtcgtttcatgactcgagagatattgaatcgctgtggagcatagggtataggccaaagcatagaaatcttactggcttggtaactcccttcaacaagaatttgattcaatcagtcggggttaaaaatgcaactgacactggcaatgtctttcttcagaggagcttggcgattttggaggagaacgatcagcgccaccaagaagctctggttaaggtggcgtctctggaggtagaggttgccaagtgaagggcaactgctaggactgtctggagagtaaagcagcccaaggtgaccaatgccactgtcgcctttgttgaggcgatcaagtccaaccaccagctacctgccaaggtgggtgaggtcttggccaagctcttgcgcacccgcttagatggggatgagttgggcggtcgttgcaaggcgcttgtgaaggagaagaaggacttgttcggtaaggctgagagtgccacagctgataaggatcatctgtccaaggtggttgctaaccttgaagctcgcgttaaggctgcgaagtccccgactagaggagtccgagcttaaagtggtgaaggggagtgaggctcaccaagagcttgaggaggagtttccataaggccgttaagcaagccgaattctttgccaaggaccttgacttgggtctttttgacccattcaaggatgtgaaggacgttgttctgcttgacaaggaagagatggttgttgttgctgaggaagataccaatgaagagcaggatgatggagccaatgtctagacttccctttttttgtattttttttttgttttgttgattttgggttgtaaaggcttttgtaactctaacaattattcttcttttttaatacaaacgcttccctttgttgatgaatttttctttgtcttgtatgttgttgtcatttatttatgtgatgccccgtaatagtaagggtagatcactttggatgatgtccttgtggtgtaggaagcaagaccttgacaaaaatagagagcttggatgaggaggctcaccaagggtgttgatattgctttgtcgagacgcatcaaaaacaattttactaagctaattctgtagcatagagctaacctaggtcgactcagagacacgatcaatatggttctagcttcaaatcattggtaataataaggggggattttgtcaaacagttggtatgcttaaagtaaaacatgcaagaacacaaactaaaattaaaaaacaatgcaaaaattaacaagattatcaaggagtaaagtaaaacagattaaaaagcatcaatccaattcaccaaccctagctattcgaatcatcatcattcccataagttgattttaacatgaacattcattcaatctcaatagaagcagttcaatcgattctactcctaaattaattgaaaccacaaccctaactgaactatcattcaattaatcttgtgattatcatttgaaattaagacatgaatccataatcctaattcactttcaatcctaaatgcattcataatcatgaaaacataatagaaattgaagaagaaggtgaacattcaagtagaattcaaaataccgaaccagaactccaattcttctcttgcttgagttagatccttggattgattaatgatttagtcttccatgatgatcaccaaggaaagccccatgaaatgagtgcagaaaaatggaagaatagcaaaatggaaatgaagaagatgaagaacaatgaagaacacttaagagaaaatgaagaacaagctattgattctaaaaactaaagaaaacaaatgaaaaacttgtttattgaattgtaaagtgtgttgtccaagttttcactaaagtcactaatatattagtgactaagttctgaaaatagaatgggccataaacaaatccaacaatctaattatttgctatttacaaccataaaaatcaaattcgcagcccaaaattacaagtgcagaggtgctaacttcaaagctcaaaataaccctcaaaataacaaaattggccttgggctatttatatcaaacttgtagatcttttcgttatctttccaaggactcctataacactccattcggagatcggtagcactctataggccctgcacaagtcagatacgttaagtgagaaaaaatctaaaaatacgcaacaattagcaattaagcccacttacttgcctaggccaaaaactgaattataatgggaaaataaaagtccaaaagaggtcaaacaagctaagaatgatagacaaaagtttaactaaaatcgctctatcaaaataccccacacttgaacatttgcactcctaggcaaaactaaaagaaagactaagagaaaaaattcaaactaaagtagaccaaaaatttaaagaaagggtatgaacaaggcacacatattttttaatcgatcacaaaaatgctcaaaagggagagagatggaaagatggaagaataatattgaggtaacaaacaatccatgaaaacatgatcacaaagtgcaaagtgaaaaagtagttaagtttagcattacgaatgcaccaaggtgatagaattctctcaaagggtggcactcaacctcacatgatgtgtatggcttgtatttacactcaaacaccacatgcaactagcacatccaagcattaacaaacctctcattcattcaacttgaaatacacatgcatcaaaagatcaaaaggactttattagcttgtagtgaatggcttaggaaaaggtggataagaaaaggatatttaggctaaaacttaagagaaaagaggggcaatgttgagcaagccaacaagataaaagaagggtagaagcaataagatgaaatttaaaagaatttacaagaatgaaaatgaactataacaacttttattgcagatttctttttctttgcttgaacttctttttctttgcttaaacacaaatttttttctttttttatacacaatttttttcttcttttctttggacttttgctatttgaactctttcttttctctttttcttttcttttctttcaaaacaaaacaaaagacaaacaccccacacttgtttgaaacccactcccaaaataattccaaagccccttttcttcctaaagctagggtaacatggttttccatcattttttagtttttaatgagctaaacaagaaagaaaaggctagaggctcaaagagggtgacaatggatatcaacacaatgataggtttatttggctagtggctaaaagaaagaacgcctaaatcatctcaatcaaagcatgtgcaacaaggaatgtcaaaagaggcaaggcaaaacatagagtaatctagcacaagggtgaaatggcacatgaaagaacatatccacaaaggctcaaaaactcacaaggcataattctaccacacatggttcatcttaaattctatttctcaagcctacttatcacttcaacaattgcaacaatgattcacatcaagtatgaacctctcaatccaaccaacttttaacatttctcacaatttatacaagttggaaatcctatgaaaaacatgaaaaagtgcctaaattcaataaaaacagcaacaaacagaaacagtagaaacagacaacaaaaacatagactcaaaaactaaaatagacaaacagactacagatagacagataaacagaaaacagaaaacaacagacactgacaaacagacagcaacaaacataaacagacagaaagcagaaaacagaaaataaccagagtttcaaaaattttaaggacccttcaccccccacttgaaatgcacattgtcctcaatgtaagcatgcaaagaaatgaaacatagagacaacaaataaaagaagggaaaaggaaactcctcaaatgtcattcaagacacatcttcacacaaaattggcaggaccaaagagatgtcctccacaaactcttcctccacttgagggctctcatgaaatgctttgagttggtgaccattgaccttgaagactttgtcggtagcttcatttttaatctcaattgcaccatggggaaaaacattagtaataacaaaaggtccatcccatctagatcgaagtttactgacaataagcttaaggcgagaattaaacaataacactttttggccacaatggaactcctttctaagaatcctagagtcatggaatttcttcactttctccttgtaaatcttggagttctcataggcttctaaatgaatctcctcaagctcttgcaactgaagcttcctttgcatacccacttcatcaaatgccatgttgcaactctttaccgcccaataagcacggtgctcaatctccactggaaggtggcatgccttaccgaaaaccaccctatagggagacatcccaaaggtgtgcggtaagcggtcctatgagcccataaagcatcctcaagaagcttgctccaatctttcctatttggttgcaccaccttccgtaacacttgcttgatctctctgttgaaaacctctgcttgcccattagtttggggatgataagctgtagcaactgtatgcacaaccccatacttctgaagcaaggatgcgaatgaccggttatagaaatggctcccctggtcactgataatggctctaggcataccaaacctgcaaaaaatgttggaactcacaaaatccacaacaactttagaatcattagttttggtgaccttagcctcaacccatatagaaacataatcaacagcatgcaaaatatatgaaaagtcatgagaaacaggaaatggtcccataaaatcaataccccagatatcaaaaatctcacaaaaaataatgagttgttgaggcatctcatgtctatgtgtaattgtgcctcctgctctctgacactgctcacaagtggtggtaaagtgatgagcatctctaaacaaggtaggccaaaagaacccacagtccaatactttcctagcggtcctctgaggaccaaaatgacctccgctaggtgtgtcatgacaaaactagactgaatttcatgatcaggcacacaccttcggatcacttggtcactaccaaacttccacaaataaggatcatcccaaacataatatttagcatcacatcactcttaagtttagctatttgggacctagatgcatgaggtggaacaacagatgcaacaaggaaattaacaatgtcagcaaaccaaggtgtgacatgtgatgaatgcaaatgcatcaaatgctcatcaggaaaattatcacgaatgggaaaggactcaagaggtccctcaatcctgctcaagtgattagcaaccaagttttctgcaccacttttgtccttaatctcaatgtcaaattcctgaagaagaagcatccacctgatcaatctaggtttagcatcaggcttcttcaacaggtatttcaaagctgcatggtcaataaagacagtgatatgggagcaaagcaagtaagatctaaatttatctaaagcaaaaacaatagccaagagctccttctcagtggtggtgtagttaacttgggctgcatccaaagtgcgtgaagcataagcgatgacatgggatagtttaccaactctttgtgacaacacaaccccaagtgcataattagaggcatcacacatcagctcaaagggaagctcccaatttggccgctgcatgacgggagaggtagtcagcttcttcctcaatccctcaaatgcctctttgcaaggctggtcaaatgtaaagtctacgtccttttggagaagcttggacaatggcaatgcaatcttactgaaatcctgaatgaatctcctataaaaaccggcatgtccaagaaaagaacatacttcccacacagaagcggggtaaggcaaagaggtaatcacatcaatttttgcctaatcaacctcaatacctctactagagaccaaatgtcctaggattataccctcgtgcaccatgaaatggcatttctcaaagttaagaacaaggttagtactaatacatcggtcaagcactctagagagactatccaaacatgcatcaaaagaggaatcataaacagtgaaatcatccataaacacctccatgcaactctctaatagatcagaaaagatgcttaccatgcacctttggaaggtgtcaggtgcgttgcataggccaaaaggcatccgggtgtaagcaaatgtgccaaatggacaagtgaatgtggtcttatgttgatcctctggtgcaatatggatttgcatgtaaccagaaaaaccatcaagaaagcaataatgtgatttacctgccaactgataaacacgttgtcgagacgcatcaaaaacaattttattaagctaattctgtagcacagagctaacctaggtcgacttagagatacaatcaatatggttctagcttcaattcaatggtaacagtaaggggggattttatcaaacagtttgtgtgcgtaagtaaaacttgcaaaaacgtaaactaaaattaaagaacagtgcaaaaactaacaagattatcaacaagtgagtaaaacagattagagaagcatcaatccaattcaccaaaccaagcaattcgaatcatcatcattctcagaaatttatcctatcatgaacattcattcaatctcattagaagttgttcaatcgaattaacccctaatttaattgaaaccacaaccctaattgaaatatcatccaattattttgtgattaatattcgaaattaggcatgaatccataacctaatccactttcaatcctaaacgcattcataatcatgaaaacataatagcaattgaagaagaagatgaacattcaagtagaattcaaaatactaaaccagaactccaattctccttgtgccttggttggttccttggattgattggtgatttagccttccatgatcatcatcaatgaaagccccatggattgagtgcacggaaatggaagaatagaaaaacgaaaatgaagaacaatgaagaacaaggaagaacagtagagagaaaatgagagcaagggttttgatctaaaaactaaaggaaagaaaaataaaacttgtttattgaaatgtaaagagtggtgtccaagtttcactaaagtcactaatatgtagtgactgagttctgaaaacgaaatgggccataaacaaatccaacaatctaattatttgctatttacaaccatgaaagtcaaattcgcagcccaaaattacaagtgcagaggtgttaacttcaaagcttaaaatgaccctctaaatgacagaattggcctcgggctatttgtagcaaacttgtagatctttttgttgtctttccagggactcctagaacgctccattcggagattagcaacatcctataggtcctgtacaagtcagatacgtcaagtgagcaaaaatccgaaaatacgcaacaattagcaattaagccaacttacttgcctaggcccaaaaactgaattagaataggaaactaaaggtccaagagaggtcaaataaactaagaatgatagaaaaatactcaactgaaagcactctatcaccaacctctctaaaacttgatcaatgaaaggcagagggaaatggtccttgcgagtggcctggttgagtctcctgtaatcaatgcaaactcgccaactgttggccactctagtcggaatcagctcattatcttgattcttcacaactgtgagacccgacttcttaggaaccacttggacaggtgaaacccaagtgctatcagagatgggatagatgatccttgcagctagtaacttcgtcacttccttcttcaccacatcaagaatagtgggatttagcctcctctgtggttgcctcactggtctagaatcatcctccaaaagtatctgatgcatgcagatggaaggattaattccaggaagatcagcaagtgtccatccaatggcttttttgtggcctctcaaaacatgcatcaacttttcttcatgctccagtggcagactactagatatgatgattgggagcttctgagcatcatctaaatatgcatgcttgaggtgctcaggtagtgacttaagctccaaggaagggggctgaatagtggaaggtaaggaaagactagggactgagggaagtgggatagtaggctcagaacttgtatctgtacctggaacacaatcagagtgaagtacggaggaaatttctacacaaatgctacacacagcagcagaatcatcacaagtacaattacaagaaccaagatcaaagtcagaaaagtcaaaagaaaaatcagaaagtaagtcagaaatatctacactatctattgcagcatcaatgatatcaagaagaaaaatagaatgttcctctacaggatgtctcatagcctaaaaaatgttaaactgaacaatgtcatcaccaaactccatagaaagagttcatgcatgcacatcaattaatgaaggctccaagatcacacaaggcatctgcaaaagtaatatttccaatggtgcatgggacagtgaaagtgccaggatccttgcacttctgtggcaaggtggataatggaatggcatcaacagttttgccctgtatcagtgcagaaacatttctgcccatcttcacttgctcattcccttcagcttcctcttgtgggtgcacaagtccttcaagaactttgcatattttggaatctgtttgatggcatccaagaggggaatgttaacttccaccctcctgaaagtctcaagcagatcagaatcaaggtccaccactttctttgcaggaatgactctagaaggaaaaggtaagggaatctgttttggtgcagagtctgttttggcaccattatccacttttttactagcaccagcatcaattttagcaccagcatctggaagttccgtgccactcctcaaggtaatggcactcacattctttggattaacaactggttgtgctggaaggttaccagaaccttgctgctgcatctggttgacagttgtagctaactgtccaatctaagtctgtaggtcctggatggtggcactgacattttgttgaaactggatatttctgctggccatttgcttgatcaagtcctccaaggaaggtccagaattggcctgcacaggtggtgtaggtgtaggtgcaggtgcaggtgcaggttgctggaactgtggctgttgtctgaaaggaggaggttggtatttggtggtggcaggctggaagggctgctgtggaggtctaaagggctgctgttattgtggaccaggaccatacctcaaatttggatgatctctccaaccaggattataagtgttggagtaaggattatactactattgaggtctgaatgactggccaagttgcatgggagaaacttcagcaggctgttctgtctcttgaagagtgaggcatgcatctgtgggatgatcaggagcacaacaaataccacaaagccttggttgattggctgccatcacattctgttgttgcccaatagcaagctgcctcacaagggatgtcaactctgtcaatttgttgtccaatctctggttatcagcaacaatagagacagaagcttcatttgttgccatcaccttagatgtaactctagcaccaaattgttgatagttggctgccatgttagaaatcaactgccttgcagcaagagagttcttgtccatcagagcgcctccactagctgcatctatcatactcttatccatcaacatcaatccttcataaaaatattgaatcaataattgctcactgatttgatggtgaggacaggtagcacacaacttgtagaatctttcacagtaattgctcacttttttttacgcccgcgtgactagcgtgggatccgcgcgatcagcgtggaatggccgaacctgtggcgcgactagcgccggtctagcgggattagcgccataacttcaacagaggtccctgggttcaatctgctttgtttttctgggtttttctctgtttttatgggttttcctctgtttttatgggtttttctctgtttttatgggcaaatacaaagctaatgcatcaaccacaagcacataatcatgtaacaagcatagttgtgcaacaaaaacaaaaatgcaagaattaaaactacttttatgaactaattgaaatgaattaaagctagcacacaatgaaccgcatccccggcaacgacgccagttttgatattgctttgtcgagacacatcaataacaattttactaagctaattctgtagcacagagctaacctaggttgactcagagacacgatcaatatggttctagcttcaaatcattggtaataataaggggggattttgtcaaacagttggtatgcgtaaagtaaaacatgcaagaacacaaactaaaattaaagaacaatgcaaaaattaacaagattatcaaggagtaaagtaaaacagattaaaaagcatcaatccaattcaccaacccaagttattcgaatcatcgtcattcccataagttgattctaacatgaacattcattcaatctcaatagaagtagttcaatcgattctactcctaaattgattgaaaccacaaccctaactgaactatcattcaattaatcttgtgcacgagggttgagctaacggctttgtcaactactgagagataaaggagtagtggcgctcttggtctggttcgactcaagacgggcagcatggcaatggtcttcttgaaggccaagaaggctttgtcgcatgcttcatcccacaggaatggctcagtttttctaagcagcttgtagaaaggctttgctttttcggcgatcttcgggagaaacctagatagggatgccaacctaccattcagcttctacacttcctgaatgttggtagggttgtgcatctccagtattgttgtgcacttgtccaggttggcttctattcctcggtgtgtgatcatgaagcctaggaacttgcttctgttgaccccgaaggtgcatttttctgggttgaggcgcatgtcatatttatagatttctccttaaacctcatctagatctgccacatgttgggctatgctttgagacttgacgaccatgtcatcaacatataccttgacgtttcgtccgatctgctatttgaagatctggtccatcagctgttggtatgtggcacctgcattttttaggccacaaggcataaccctatagccgaaattggcatcttcagtgatgaatattgttttctcttcgtttggggcatgcattatgatctggttattcccagaatatgcatccaggaagctcagcacttgcaaatcggatgccccatcgactagcgtgtcgatgctgggcaaaaggaacccatctttggaacatgccttgttgaggtcggtgtaattagtgcatattcgccatttgtcattggcttttttggtcagaacaacattggtgagccaggtgaagtacctaacctccctgatgaacttatcttcgagtagtttatccacctctttgctaaccgccttgcaccattcgtcgcccatcttcctcttcttctgtgatactggcttggcctgagggcagatggccaatttatggcatatgatactctggtggatgcctggcatgttagatggtttctagcaaaacaagtttgcatttttgtggaggacgtcagctatgcatctgtgctcatggctagtaaagtccttgttgagctgcgtgcactacccgggtttgggtccgagttgtaggttgatgagttcttcaataggctttgggcctttgacaatggtgtcatcacgtggatccacgttgaatgcaccatcttgacttgtgttgtagacagtaagagtttgtattggagaccttcctccacgttcatgacctgctggtaccacctaaagtagggtgatgtttgtcgggctccttggtgggaggatatgatgccacttttaagctctctacatcgcactatcgggcttttttttgtctaccttcacaatcattatttctcccatcaaggtaaggaacttcaccttaagatgaggcatggagacgattcgtttagtgtttttctgccaatcaaagaaaagtaagaggtgtctgcattgataatcaaatacctgatcatgcagctcttagagctggccttgaccaaaggtggtcatgaggtctatgtagcctctggtttttaccctctcccctgcaaaatcgaggagagctccaaagtaagaatggatcgtgtttgacgagacctcaagtttttataatgtattctagtacaggatgtcaactaatttgcctttgccaatgaggaccttggataccatgaagttagcgatcaagacatagaccaccataggatcgtcctggctaacacggttgatgcccttgaagtctctgtcagtgaaagtgatgggtgggagactccgtggtggtggaacatcgacacagttgatgccgatgtccctgatagcgtggagatgtcgttttcgtgattagatggacaacccttcacaagaaaattcgcccgcgatagcgtagattacaccctggatttgctgggcaggctcattttcttgttcttgtagaggttggcattcttgtcttggctggtaatgcctctgcctccctttgtcttctgctctttctcttttcctgcaagcattttgattcctgggttgatcctcttggtgttctccgagtcttgttcttgttaggtgattgctagatcttttcacaaaccgagataactacccagcttgtacgagttcttcaattttgtcttttaggccccaacagtcttctgtgttgtgaccgctactacaatgatatatgtagtatttggtcttataagaccctagccttggaggaagtggttggggcagttttacaaaattacaagtatcttcttgttgaaggccttttccatgatggtggtgtaattgaccgtcaagggtgtgtagtgctcatactcgggtccccttgggagagactagcgcttgtccggtttgtgccttttgtccttcttgtattggtcgatcttggttactccttcctattttttgtgtttctatccagcttgtcggaccttgttcttgaactttgacatttcctccatctgaatgtaacccatgactcatccgcgtaactcgtcaatgctagaaggtggtttcttgaataggttgtccacgaacttacatagtcgcagggctaacatcttggagtgcaatgccaccgctgggttgttgttttagatctggacggctgtttgtgcaaatctgtccatgaaccttcaaagagaatcatcgtctatgtgtcgcagactagccaatgcaacagaggtgatgcgatgtgattggctggttgcatactgtgagttgaagcattcaacaaaagtgtcgaagttgttaatggagcttgggggtagcccccataccatgtcaaggctgcccctttgagggatgttgagaagacacaacacagaatcgcatcgttgttggtgtagaggttggcctgggtgaaaaagcatccatatgttcatttgggtcaatggtgtcgtcgtactgctctaggttgagtgatttccaacctagggataagtcgacttccattatgcagttgacaaaaggatgtcgtcgagtcgtctgcccttttagacgatggacatgtgataaactagggtcatcttgagtattgatggtgtgccggggtgtgattccccttgagtacgctcgttcgttgtaggaaccgagtgttcatcactttggggggtctcactagagctttcagttgatcatggtcagccttcaactttcggagttcctcctcataatgtcacttcatctccgctatgcgggtctggagttgctggattgtttctagcatatttgtcataggaggtatggagccttcgagaggagtaccacgtctaagactaggtcgtgtactgaccatgggtaaagtagcgagggcataggataagttttaccgcaaccccatggtgggcgccaaatgtacttgcatgtcagacagtgagtgggccttgttaagaggggggacctgcaaaacaaaggagaggactccgacgctcaaataagtacatcaatcatatgagaataatgtataaggataagtctgtgtatcgaagtgtgtatgaccgtcagtgtgaataactgagcgtgtggatgaatgcgtcaatgagcgtatgggtgctcaagtgtctgtgaatgagtgaagagagtagatgtctcttggtgtgaattggtggtctcaagggttagacggaacctggtatttataacgtgaggaggagcttctagtccttgtatgtcggggttgttacagtggtttaacaacccttgtagataatgactaacaaatgattacaggttatagataattaggtttacagataatgtgtaccttgtagataatttgtggcttgtagataattagatatctgccatttgataaggaggttacaacattatcgataacatttgaataataaggcattaaagataacccattaggcttaatagcctgattactgaggggaaacacgtttgtgctcctgtagcagggctaacatagagggtggacttgtgtactggggcgccacgtaagtggccacgtgtatttggcagaccctggatagtaaatgtgcatttcaggtttatcacaactctataacttcaaaaaagcaattgattaacaatcaaatttgaaggaatttatcatattttggggtaactttgatttttaagaaattcatttaattattttatcttatttctctctcaatcttaccttttttttctcttatttttatttccattttatattattctctcaatcttattcttcccttcaatccaccacaaaacccctttataattgtgaaacaactaaaaagcatcaataattcatttcaaatatattttcaatcttctatttatctttttgtattctttattaatttgttttttttttttttgcattatttgaagatatttttctttcttttttaacaagtgatataaaatatggataatttaaatactcaacaatcaagagaacaatcaacaaagagaaacacgaaggaaaaatacaagaaatagaaggcgaataatgacacggaattaagacaagtgaattatctaaaagatggacaagtaatagggaaagcatgagcaacacaattaatatgaattttatatttttgttactttcatgtatccaatttaggtgtaatgtatgtagtaatgattaatcatatgtaattttcttaaaataacactccatacttttttttaattcaaataattaatttttatacaattgttaaataattatttgatcaatttacatttaaattttaaaaatatttaattgtaattttagtggatacaattttgtcacattttcatagtttgatcttataattttatttattgaaagtttaaaataattgtaccactggaataaaaataatagatgcaatgcaaaataaaatgaaataacacaaaagtaatttacaatttcacatgtttatttattttcttaaaaataataaaaatccaaatatttgcttaaaagatagtaggtgattcaaacacataacaataacaccacttgcccattttcttctacatcatccactcttctaaaatcaccatcaaaactgaatcttaattttgttacacccctaaccaatgttttaaaatccagaccgacccggtcggtcggacggtgaatcggtgactggactaggttaggttcctcgttggttcggctatgctttcagcccggatccacctagtgcgacctggtcgggctgtggtcaaaccaacgacttgtcaacccggaccaagtcaatttttttctctccctcttaagtgaaacgacgccattttgatttaggttttttagaaacctaaaaaatgcaggccacagattagcgtagctccagccttcagcccgtcttcaaccttgttcttcgtcgcagcgcagcgcagttccagtctggtgccatcatgcttcgcacagtgacagtccggtgccattctcgcttcacaccttccagttctcctgttctcgcatgcctgcaaggtataaatgttaattttcccgcgacatttctgttctcgctttccgtgttgatattcgttctcgcttgcctgcaatatgttatgcattctgcatttctgctatataaatgatatgtgttctgttatgtaaatgttatacgttctgctatataaatattatgtgttcagaatgaattttttctttaagggttcatgtgtttatgtttggttgagctattcgaaaattattgtgttttgtactttaggatattgaattttgcaattctatttgatgtgtaagattgactgggtttcttaggaagaagaaaaaacgctattatggtgccttgatgattttcagaatttgaatttggtaagattattactactgcattaatttgatagtgattttttgcttcaaaatagccctgaaattacaatttaccaacaccaaattgagttcatatgataatctttcaaggccaaattggggatttgtgcttcttcattgattagaagaaagatgaagtttgtttattttcaagttgtttatgtttttacttcgggttgtaccacaaagaggggtttcatttgaataagatttgaagagggctaaccatcagcgctttcatacttcatgactaatatagttgtagtattgagtcaagattgtgtcattgaaaaaattccatgaaactaggttttaaaacctcatttgatagcatattgaattttatatgaagataatctagagttagaaattgtcggtatcaagtcatttgaattgagtaatgcactacataagtgcttgttaatgtttgggattgggaaataatcactcattgctttaaaaaaagtatgttgaaccaaaatgcactagagtaggtagggattgattatgagaaaaatcacatattttttaaaagttatccaagaaaactgataaaaatgtataattatttttttcaaaataaatagaaccaaactagcttctatcaatttagtcctgaatttattaagtgactatctttttaattctttattttatggaaggtatataaatttcatatttattattatatattgaggtcatgcaggtcaattagtgatccaccggttcaaccactgatctagtgacccaatgtcctgatcggatcagtcatcgagtcgatttttaaaactatacccctaacatctttttatttataataagttaataacttctaattcattgctatctctcttttagtcttctctctcttcatttgttaacaaattaactctatggtaacaaatctaaaatttattttaagtttatattattgaatttaatgtgactatatattaataatttattaatgtaactaaactaaagtgaattataaatacacttttcacattaaactaatcttcaatcagttatacatatagtcaattttatatgttttaaatcaacaaagtgacatgtagaaaaattaaaaccaaattcactaatttgtaggcttgttttttaatacttttattattttctaaaaaaataaaaacagagtttcattaaaaaaaataggtgcaatatttttaaaattaatcatgtattatgtattcaatagaatgaaatttaacatactaacatatattatattaaccatgtgtttgaatggggaatttaaaatgtcaagatttaaaatgctcttatttaaattttcttaatttttacaagaattataaattctccctttttctgtttattaaaattcccttttaaaatgatagatattcaatttctctttaaatttctcatccaaacgcaaaatttaaaatgaaaaatattcaatatctgtttaaaagaaattaccctctttaaatactatatccaaacataggaattgaaaggatacatgcaacacaaaataaaatgaaataacacaagtggtttacaatttcacgggtttattttttttaaaataacaaaaacacaagctagataaaccattaatttgaccaaccccaaataagtagttaatgcataataaatgatcattcacataatttaaaaactaattttggttttatatgtaaaattgataattttaaaagcgaaacagatttactgattaaaaacagatttaatgattaaaaaaaagtaaaactgatttttgaataattactcattttaaatgtgttagccgatgccaagtaaccgttaattttaaataaaaccttgaaatgaaaaataatttttaaaataagataaaaatatattataattgatttttaaataaaagattcacttgaataacaaaagcataagaaattagagacaaagaatttttaaaaaattgaaaaatgaaacaaaaattaagttcaacaatagaaaataaaggcagaaaaacaatataatttaacggtgaattttgatttgttggggagaaagttaaaatttgggtggttgttttggagaagaaatcagttttttaaaggtgaatttttgtttacagattaaattttgaatgtttttaagataatggaagtcttttatttggaggggaattttgggagaaaatttaatttaattttttaaagtggatattgttagatttaaaaaaaaataatgggagttttatttggatgataatttcaagagaagaatttagtgttttaggtgaatttttgtttagatatttaaataattttaaaaataatggagtttaataggagattctttcaagtaaaagtaaagaaatccaaataacatttaaaataaaataaaaaactaaatactaaattttgtgaaataaaaatattgatacggatatcgatatttctatattatttctgttagtatatataaaaaagtggcttcaacaacaataactaattacatgtgtcattagatgacgttagtccatgacttttgactcgatctactatttgtcatgctagcaaacacttaattttgttaaggagaattaagttgaaatggcaaacaggagatacctttaacaatcaaataagatgcatgcagactcaatcttcaagaagacctaacatatgtgtaatatagatgatttgataatgcaactagcagaaaacaccagttaaggatgcaacagaaaagaagtcatgttgctcaatcataatctacaagcaactgacaaagttcttgcttcttcgattagtcaattgatgaaaagaacaatcaacgtactaatgatagtagtcaaggttttatttttttcctatttttttttgggtacgccagcgacattattctacaaaacatttgcaacacttccaatgtctcttctctactaccacggcaactttaaaatgtttaaatatttattgattgactgtatgaaagacaccctacattattttgcacgtgctttctagggtttataggctactgaggcaatacccgtgtaaaagcagttgtagaagtcttcttttaattttcaagtcctttatcaacagatgacttgggtaattaactgagaaaactttttttttaccgagacaacttaataaactgtggaaaaaaatagaggggcatagcatattttgacgacaaaactccctaaactggaatttcaatgtgaagattcttagtgggaccaaatagccatttattaaaaaatattaatcatttgtaaatttattgctgagttcatttaaaatatgaacaaagaattaaatttatagttggtcacccaatgaaaatgagtaactaatcaatagcaactattataggtaacatcttaatttgctattgattaaagacaagtaagaaggtttactctgaatttacgggaataaaaaaaattaaagaattttgtacaatgaatatttaaatttattttacataaaatatttaattacataaaaatcaaatcaaatcaacttttttttagaagaaaatcactattattttctaaatcgttataatttcttgtaggtgttgctactcgcttaatcaactaacaaccgctaaatgaacttgtatggaaaaaccaaattgaaacaacttttgttttttctcatcatataattattcctgtaatgtttaaaattacaacactacaaaaaaaaatgatttttccgacggaaattttccgtggttaatgcctaatttccatcagtaaactcacatttccgacggaattccgactgaaaaaaattggtcgctaaattgagtatttatagcttttttgtgttgttacagggttacaattaattttgtgttagaataaacatattattataatacaaattagatttaactcaaccataaaaactaacttcaaaacttaagagaaggaaatgatccaagtcttataagaagtacttatggacatgaccaacaaggcatacctatggtgcaagaaatagatcgagaaaaaagggatttctgagaggaagagacattcggactatcccacaaggccacaaactttaccagctttagtagtaattaatgctaatgtcaaaacactaaatacatctattttggagctaacaataacaacaaattaggtttgataaattaaatccctaatgttctgtcaaatgttgttacttgtttgtgggactagagaaaccccaaagcgtacctggtcatggtttgtgtggtggtgtcgtggcggtgcttggtggtgtgcgtttggcttttgagtcgccggagacagaggaagaagacaccacagcttgagcttggcgggactgcagtgcggtgacggaggaagaagacaccaacatgcacagttgaagcattcgaaatgcgtgcgagggtgcactgatggtggtaaattagggttggaccttttgttttccgtataaatgaaatttcatacggacagaacggctattggaaacatccgtcggaaacccccaattttccccaccaaataagctttgttgatattgtccatgagtaaggcttacaattccgacggaattgttctggccggaaatggcccgtcagaagcacgctcttttcttgtagtgcaatatgtgaaaaaaacaacattaggaagtaaagtaaacagtataaagtaagaattatagttaataaaaaaatattctcaaataatttgtattggttaattatcatatattatattattaaatattaattattttatttgaaaaggtaattaggaaaataacgtgaacgtgactataaatactcgttactaaagttcaaatgaatgaaaatgaaaaaggaattatttaatatttttaagaattattgggacttgagttaaaaaaattattgggattttgttaaaaatattaaactacaattaattaaaaagtaaggaaattgttgggaatttaataatttaacctataagcgtattattgttcttgcactatttgtatacttgtctagatgactatatggaatcaatataagtttggatgaccatagcatggagctcgaccgtttaaaggggtaagctagcatgtgaatatttattttatagtaaaagtagaaatatagtgctttttttttttaaagaaccaattattgatatagtaaataaaagttaggataaatagtaaatttatcctttaaaagtgaagtgtgagatattgataaattaattctcaaatgatgaaaaatttaaatttattttttgaatgtacaaaaagtatgatcaattagtcatgcaaataattcaatgacaaattaatccataaattttgcaatttaatgtcaaattcgtcttcaaaaatataacttttgtcaaattggtctttaaacattacaacttagtaacaaaataatttcacaaatttaatagcaagactaatttgtcacacttttttctatatttaggaattaaatttgtattttttatcttttagagaacaatttatcattatatcagatttttaaggataaatttaattagttgtcataaaaattaaatgtaatgtcttgactttttttgaacagctgcatacatacatacatacatacatacatacatacatacatacattcatacacacacacacacacacacatatatatatataagcacaaggaaattggactaatcaaaaggacgagaatataatggaaaccctttcagtcaattagaattggggaccaaaattagcaagaattgggaaaggcatatttaacatagccggtatgagatccagtaggacgtgaagtggatatataagattgatttagtggtacataaagaatgaaaaaggaggattttggtttgaatttctcactaataaaaactaatattaataactaatattgttaataaaaaaataatatgagatccatgtcccattatgaccaattatacaaaaactaacaatactaatgactaatatttgtcgataaaaaaaagtatgagatccatgtcacattatgaccaactagctttatttattttaaaaggtttaaatatattatagatccttcatatatacctgaatttcatttttggtccctgatcaaaattttgcctccccctcccctccctccctccatgaactgatgctctactgtcagcgtcatcacaagattcatacccaaacccaaaatggtttacttctctctcgatgcagggcgagcaaaatcaaactaaaagattcataagaatatgtgaagcgtattggacctagtacgtttaaatgttataagatcatccttgtatttctaatcaaaaggagatattacctcttgaagtgtgatgcaatctcctcctttttctttgttgagtcctctcttggcatcctcaatcaattatgaatgacaaatcttccatactattcttgaataagggagagggaaaatgtgtggacacttttctattttagaaagatgacgacaactgttgtatttgtctatagcaaataagattattatatagaaaactaagaaacataaacctagctctcttgggccattgccatacacttaaacccaatagtttttgtataaagagtattaccaacaatctcccacttgctcttgagtacaaacttaagcttaaagctcaaaaccatgtaacttacttttcatcatcaactgaaaatgtctcaccctttatttcaagctagaacggggatctacgatttattattaatcaaggctccttataatcaataaataattatataattcggtgttattccactaaaagtccaaagttgaactccaagatcaataatatatatgtataactcgaatatgcatcgcccctttgtaatatgtcataattgattgatgagttttttgttacttaatcaattattttttctcttgacattgatagtttctctaatggattacatgcattgaccagtgtctttaatgtccaagtaccgaaacatatcaagaggacatatcctacaaattccatgttgtttatttcataaatatcgataatcaaataatttttcctcccaaaatactgagttattagccctcaattggtcagacctcacccgttgttaaatcaaagaatgaaattattcaattacttatttataatgaactcaagattaagagcattcacataactatggttagccaaagatttgatacttatgacagaaaaacaaccttaatcaaatatctccttgaccctttcaatgcgaacattaattcacaccaatattttacaatggctcggacaagaccatttcataaaatattgcaacctaaataaagcgcccaactttatttaatagctatgaacccattcatcaattgtaagaacctatgatcatgtcctccatgaacatatccatatgattatatactctacaattgatctggaccttggtgtttgtaaattctgtgtgcataccataaatgaataatacctcatttataactttcaaaaaattcaatgtcatgatctttctcaaagagcacaaaataaacaaagtggaaattcaatctcctaaagctatagcaagtccaaaatcttcttaagacccatagatgtaacatgtatctcgaacccacgttcaggcaaactcttttaaaagggtcaccaaggttttcttccgatactatcttgatgaccactgtgtctccttggaaatctgagtttatgtaaccaatggtttcaagaatcccactagaatagaccaatatataatctctcgttctccgaagatacttgagtatatgcttaactgctatctagtgttcctctcctggattagattggtaccgactaacaactcccattgcatggcagatgtctggcttggtgtacaacatagcatacattagactacctacagccaaagcataaggtatcctactcatgcgttctctctgcttaggagtcttaggagaatgctccttagagagatgaatctcatgcctgaagggtaaaattcccttctgagaattctccatgctgaacctggcaatgaccttgtcaatgtaggaggcctaggacaatgccaataacctattcttccaatctcgtaagagtttaataccaagaatataatttgcctctcccatgtccttcatatcaatatgcttgttcaaccaggtctttatgtctaacaatacctcagtgtcatttccaatgaggagtatatcatcttcataaagcattacaaaagatattgcttccctttggattttttatgttcacatggctcatcaggacttttcacaaaaccataagatttaatggcttgatcaaacctaatgttccatgacttggatgcttgcttaagtccatagataggcctttgcaacttgcataccatgtgttcctgcccttcgactatgaacccttttggttgctgcatatagatgtcctcttctaaatttccatttagaaaagtagtcttgacatccatttgccaaatctcataattgagactttccgcaatagctaagagaatccgtatagacttcagcatggctactggcgaaaaggtttcttcatagtttacaccttctatttgggtttacccttttgccaccaatctagctttgaaggtttcaacctttccgtctgatcctttctttctcttgtagatccatttacacccaatttgttttatccctttaggtgcttctacaagagtccaaattgagttagaatgcatagattccatctcacagttcatagccttaagctattcctgagcatcaacatcttcaagtgcattgtcgtaactaatgggatcgtcatctctttcaatggtgacagcctggtatgattctcccaacaaaagatatcttgcgggtttacgaatcattctcccactacgacttttcctaacttgttgttgtgcatctacaggagaatccaagttaagtggatcaataattttttgaagatccttattaggtagattaaccaattcttgattttattcttgaacaagtgatacttgcatttctacaggttccacttgtagatcattatgctgaacttctggttctatatctagttcctatgttcaccttcaggtataatttcccctctttgaacaaccataggaacataagatggaaccacttgaggtttagttaaaacttcacctgagacaagctcatcaagaacaatcaaactctttggtttgtaatttaccgtacagtcctcctctaggaaagtcgcatgagtgcttactaagaccttcttaccttttggcctataaaacattcaacctctagttcctttaggatagcctacaaacatgcacacttctgtacatgattccactttatttggcttttgttgtaagacatgtgctagagcaccccaaatcgaatatggattaaactgggtgtgcacccattccataattctgtgggtgtctttgaaacaaatttagatggaactaaatttaacaagtacatggcagtttctaaggcatatccccaaaatgattcagacaaagacgaaagcatggacctcaccatttctaaaagggttttgtttctcctttcagcaacttcattctgttgggatgtccctggagaagacagttgtgaaactatcccatctttagtcaggaaagacttgaactcactagataggtatttacctcctcggttagacctaagagtcttgatgtgaacaccaaggtgtttttctgtctcagccttaaactcttggaattttccacaagcttcggatttattacgcatcaagtatatgtatccaaatcttgagtaatcatcagtgaatgtgatgaagtacccataccctcctctgacctgacatttattagtccacatacatcagtatgtaccaattccaagtgcagagacaagttccctatttccaagtctcaaaactctttgtccttgaccgataggcaagctatgtttgaaccactccaaagagtaacaaacatggttagtggctcctgaatcaatgatccatttatcactgtaattctccactacgcaagcctcaatcataagtagcacattctaccttgttgaacttctaggagtagcaaacacgccatcaagagttcggagaatttctactccactcttaagcatgttcacttgctcttgcaactgattaatgagactagccagaatgtagcagcgaactaacatttgtcttctcccactcagaaaatttcttctttctttcctcagaagcattttctttaggttgtgttggcttaggggtagtcaggacaaagttgagtttcttatattgcagaataatatccaaattagttttccattgtttgtagtttgaaccatccacgggcttttgactcaagataatagctaacggattgaaaaacattttctgaaagttaaagcacacaatttacaatcatacgataaacattctagttgcaagtagatttcttaactacttttgttcattgttactattctttagttatccttacaaggcttacgttgggtaagtcacttgtaacaaactgaaattgttatttggaccttatatgaaaatacaatgaacgttaatcaaataaaccaagaggggggtgaattagtttatctcaaggatttaaaatttttctcaaaacaattcgcggaatttgttaaatggatcgtatcacttaaaacccttttaaaatcagaatctttctttcaaccaaaatcacccttattcaagtaatgcctgaatataaatcttgttgataatttattgatcacccaaatccaaacaatgagaaatgaacagaaaaaaaatgtttcaatgataatgaatagacatgcaatgaaacatacaaagatttaaacaagagacaaagcaattatattggttcacctctcaaccttgaaggctacatccaattgcttccaaccaacactaggttagagtaattactatatcaaagaatctttaacaagcagtttacaagtgatttctttatcaacactagacaaagatacagattctaaaaccccattagaatacaaatcaccaagatactgagaaccctactcagaatctcagcctctagagaatcctactctagcatgcttgaaaagaaacacaatgatatacctcaaaacaataaaaattgttagaacatctaaaaagataggttcaagataaacacatcctgagatctttcatgtatgaatgaatgaaaagaaatgatgttaccacactctccaggttgtaagaagtaatagctcagaatcacaatcttgaaaaccttctttttccaaaacatcttcttcaaatctcagaaattttgatcacacaagatgatctttaaaactcagagtaaaatagcaatttggacacttatgaaagcttagaaacttttggataagtcactcttgtaaagagtaaatcgctcaatgtctatttataatgaaatagactcaccaagctttgtataaaacataattaactgtcagtaatcgattaattcgctagtgtaatcgattaaaacgtcatatgtaatcgattaaactgactaaataatcgattaaactgttcatcatctttctgaaatggtttcatgaacaaaataatcgattaatgtaacgacctaaaattattctagatattgtatttttattaggattaaatttttaagaatcgttagataatttttattactattttatttttactgaacgggtcctagtataaattccaaaacatatagattatagaagttgttaaactgctatatatatatatatatatatatatatatatatattataagtagtcatagtccttgttaaaaaagtcattattaaacaagtacatgattttccatacacagacctacttcttatcttcatttctacaccatcaccaatccagggcatcaaggagattgaccattgttgccatctaaaaaaaatgaaacaaatctagtgagaaataaaaatttctcagtagacaaaactaaaccaccaagcacattagtacgttagtaaatcatcataaaataattatgcaaactatatgaatgcatgaaatgaattttcccagggtgcacatggcctctacttatcgtgttgtatgtagctacaccttgtactggatgtagacgctgcgatcgtcttacgcaaacatgcatgatttctaccatatatttgcacctggccactacatatcgtactgtatgtagtatcaaattttgacaaatctcgtactggacttggaaacataaatcaacatatcatcagtcaaaatccattcataataaaattcataagcaaattacataccatcttatggaaaaatgttgttatcataacatcatacataccacaagtatggttaaatcatcataccttattcaaataagatcattaccacttaggcatgacctttgaatatcctcaagctataaaaaaatcatgttagtaatataactaataaaccacactatatctctcaaataatttctaattccgttaaaccttcataagaaaagattaaaacctagcatgcatcttaatctcctttcacctaccaccttgctacttcatcctcaaatttaatcattcaagcatttgaaccatttaactacataccattcaacctctacttataaaaattaatacaaaacagtctcataataaaaatatgaacaaacagcccaaatatcatcaaaatcacttccaaagatcactaaatatactttcaaatatcactaatatttcagcctatgaatcatcacctatcctatggtttaaatcaacatttccatatcataaaataaccttcaaataacatgaatttccaacctaaacaataaccataaatctgcccaattaagcatataggttaatccaaacaaatgtttaactagagattgaaacctagcctacctcaaatggatttggatttgaaattgattaagtggctgcttctcttggaaatcctctaagaaatgaaaccttgaaaagaagaaaatttgatgtagaggtgaagctatggtttgaaagtaataagagaagataagaaatgaaaagctaggtgcaaggaagaaaatagccttggaggtgtgaagctagcaattcttacgtgcaaaatttttcaatacccctagctatttatattcatttaattagttagaatggaaaggatatagttatgtttcagctttagttagtagttagtttagctataacttaactaagtaattattactttagaagatattatcacttaagccttattttgacttgatttttcttggtcaagattccatttaatccttgacttgggggcagatggcctatgcacatgaaaaggctgggattatctcatgctcttaagttaagtagttgtcacatggatagttctaaatgttgaattcaaggggagctgcttgaagcataagcaaagattcatacaagactaaagttttaagctttcaaacatgcaaaggacaacttggagattaattaggatcaaatgtaagagaaaagcaattctgatgatcctaaagcattgcattcattctaactcgcaaataacttaaaatagtttaataaaaatcacaaggctttcataaaatggttaagtttcaaacttgattcaaaggtttttggaaaaatgattttcttgttgttttaatggattacaatatcgtattaatcgattattttgttcttcacttattctggaaaagctttcatgaacattataatcgattacatatcagattaatcgattattatacctttggttcttagaaaactaccttgttgaacattttaatcgattacctataagtagtaatcaattacatgcttaaatatgtattttaagaaatgctgggataatcgattacataggcttatctgaaaatagtcactccctgctttaatcaattaccataggtggtaaccgattacatgttgtgtttaaattctaagttttgtactagataattgattacctagattagtaatcgattatgctgtgtaaatcagaaaggctatggcttctgctttaatcgattaccatttccagtaatcgattacacggtgtattttgaaaaacatgaatcttctgtcttaatcgattacaatacggaataatcgattatttgttccattatagaaattccagaaaagcttatgaacattttaattgattacattcttggattaatcgattacataagcaaaataatcaattatcaggcgcgtattaatcgattattcctgttacgtttttctgttataaataggaaatcactttgcttgattttgtaacgttgaatattgatacccattgggccaaaatagttctaagagtctttctaagtgttttcaaagtgttttttacatgcttgctctgctacaactttgatcatgagtttgtgagtcaatcttgagcaagatttcattcaagattaagggaagttggtttaacttgtctattcaacctgtgttaatccatcattcttgcattgttaatcattggatcatcaggttgtttctctccttaatctttttgtaattttcattttgattttggatgtatatttgattgtctattgtaattgagtttcttgcttgtaaactagagataggatttctctaggggttgtgctgagtagtgttctcagtgggtttgtctctaagaatctaatagtgttttagatttctgaactttatctagagttgataaagggagactttgtaattacttgtaagaacagaaaattgcaatagtgaaactccattctagtgttgagtggaagaaaactggatgtagcttcatagtgtttgaagtgaaccagtataaatcttttgtgtattgattttctatttctgtcttgatcatattgtatttatcttgtttgtttgggtatgtttatcaattactttgagctattggataccttaggctgagcatttgattgaataaagtttcttggtttcaaaagtgataaagatactaagggaaactctgattttgtttaagaaaattttaatttaccaagcctaaccaattcacccccccccctcttggttaagtgtgaaatgttcctatattttacactaaagagtgttcaaaaatcttggacaacttgtcttattcattgtcttcacattgactttgggtttaccaaaatttctttctattagatcacttagccaagcttattccatcaatgtggcacgtgaatcacttctaaatagtccaagtttgagctgaatatttgattccttgggccaaaattccaagagttacaaattgtgcccaatccaaatggcccaaagggctagatacacttaaccagatgaagttcactcattgtttattttgtaccaatatactaggccataaatcctcatattttagtatgttaaactagacttcctaagctttctaacaaggtatcacatgtcttatttggagctataaaactctagctataacatttttaatctagacttccaaaacttccagcgaaattcatcttaggacaccgacataccttagtgtttttgttattggaagcagtaatcaatctagattgatctgaaattttaatatgttgtagtagacatatagatctttaatttcatatatcatacacttaatttgaataagaattgagagagaaataatttttcaatttgggtggcagatatggaagtttttggcagcttatgttcaaataaaaattgattctatttttcttgtattcaactaccatcacaggtgtttttcatgtgataatttttctcatcatattatcacgtagtctgaaactatagctcatgatatctttagatattcatgcaattttcttcttttctactgtaagttttatttacttgcatttactatattgggtagtaacattgagagacttatcttctagcttacctaatcataaattttcggctagtctaggtactcctagttttcttgtgatttttatctgttactaagggtaatatggtaatttgtcattccaagggtatttctgtaatttattcaaatctctacaaaatatctaaggaaaaatatctaagggtattttggtagtttgtcactcactccaggggtatcattgtaatttccatttcaaggtaatttggtaattctcatatcaaaggaaagggtaatatggtcattcttctttaaacatttttataattcctctttttatctctaactaacataattaaaacaggtcgttcgacggctttatatgaattagcaatttttttttatcccctgttctttttaggatgttacaattaaaccttactataatcgattaaagcaacaagctattaaagttcaaaaatacttttgtaatcgattacgattcatggtaatcgattaacacagaatgagatatttcccagaaatagactatgtaatcgattacaagaaatggtaattgattaagtcagcaaagcatggtttttatgtaatcgattaaaacgaacatgtaatcgattaaactgttcttcaaggcttttccagaaaagtttgaatgtctttaatcgattaaactgcttgtgtaattgattaaagcaataagtcttgctttttaacaactaagccatgagaatttaaccatttgtaaaaccatttgatttcttttagatttaaaaccatgaatgcatgatcatgagaatgcacatgctaatgaaagatcacaaggcatttaacttgaaccacttagacaaattacaaatgccttctaatgattgggcatgtaaaagctaaaacaaaatcaagtcttcaaccttggttcaatctccttgcagcttcctttaaactccacattatatgccattactagagcctcattgggagggttaaaattttaccaaacttgaatgtaattaaccatcgtttaatttcgaaaattatccttagtatccaagcattgtcgacgttgggtcgtacaatactttactaaaatttttgaatttgttgagatccaatcaaataaaacctggtcatccttatccattggggtttcccatgaccattttattaatggacccacaatagagcccataggtttaaatattaatattttatttttaaaaccttcacccattcattattttgttacaaggaattttttaaaaaaattgtccaatcattaatctagaatttgaaattcataatgattattaatttgaattcaaaatcaattttgaatgtaattaaccatcattcaatttcaaaaattatccttagtatccaagcattgacaacgttgggtcgtacaatactttactaaaatttttgaatttgttgagatctaatcaaataaaatctgatcatccttatccgttgggacttcccatgaccattttattaatggacctacaatagagcccataggtttaaaaattaatattttaattttaaagccttcacccattcattattttgttacaaggaatttctaaaaaaaattgtccaatcattaatctagaatttgaaattcataatgattattaatttgaatttaaaatcaattctaaatgtaattaaccatcattcaatttcaaaaattatccttagtaatcaagtattgtcgttgttggaccgtacaatactttactaaaaattttgaatttgttgagatctaatcaaaataaaatatggtcatccttatccattagagtttcacatgaccattttattaatgtacccacaatggagctcataggtttaaaattaatattttaatttaaaacctttgcctattccatattttgttacaacgtatttttcaaaaaaatagtttaatcattaatctagaatttgaaattcaaaatgatcattaatttgaattcaaaatatttttaaaaaataaatctaattattaatctagaatttgaaattcataatgattattaatttgaattcaaaatcgtaataaatttaatcattaatctaaaatttgaaattcataatgattataaatttgaattcaaaatcatttaaaaataattaaccaaatcattaatctagaatttgaaattcataatgattgttaatttaaattcaaaatcatttaaaaattaattaattcaatcattaatctagaattttaaattcataatgattaataatttgaattcaaaatcataataaatctaatcattattctagaatttgaaattcataatgattattaatttgaattcaaaatcatttaaaaataattaattcaatcattaatctaaaatttgaaattcataatgattattaaattgaattcaaaatcataataaatctaatcattaatttagaatttgaaattcataatgattttaattttaaatcaatcaaaattatcattgacataacaaaatatatgcatgatcaattaatcattaatattgtgatatgacacaaatattttatatatggcatgttatcacatataatctatctattcataaaaatggtaattataaaactttaatccatggtttcctaaaaagataaaaaatatcttcttctccttttgctattttttcagtcaatccatcatggacctctgttcacctagcccaccatatggatagaatcgccattgagagaggagcacgcgaccatttgaaccactgaaaaaagacgcgatcttttaggaggctccggtttgtgttctcatcatttttctgtcctctttcattctatgacctcagatttttcataaaagtgtcagatagtcacgaacagactcaaacagtgatgaatatacatctttttgatacaaaaattgaacatttctctcttacaacaataaaattgctaaacaaaaagaaaaaaatcaaggaggaaacccgatcacaagggatcagcctccttgttacatatctaaaagaaatacattcaaatgttctatcatggattaaaacacattttataaaaccatacatcttatgaaaaaattataaaacacaacatatgtgtaatctaacataaatatagatccctatgtgtcatattacataaaatactagatcaacatcaaacgtacaacctaggctctaataccaaatgaaggattcctaagaatttacagaagcgtattggatctagtacgtttaaatgttataagatcttccttgtctttctaattaaaaggagataattacctcttgaagcgtgatgcaatctcctcctttttctttggtgagtcctctcttggcctcctcaatcaattacgaatgacaaatcttccgtactattcttgaataagggagagggaaaatgtgtgggcatttttctatttcagagagatgacgacaactgttatatttgtctagagcaaataagattattatatagaaaactaagaaacttaaacctaggtcacttgggcccttgccatacacttaagctcaatagcttttgtataaagagcattcccaacacaaactcaattgattcatatccacaaaatgtgattgagtaggttctacaacgaaggagaagaatgggttttgtagcagagcagaaatgcgaggagaaaagtgtggtgcttctatgcccaagaattcaacttgatcctagatctagttctggtttacgcatttgggtaacacaactcgcagttgagatcgccatctacaatggtgatgtcggtacagtcgaggagcattagggtgtgcgcttgaggttaccatcgccatggaggacaatgactcgtcacctgcaattctgggtttacttaagatttatgttcatatttgcatttcttgtgtggactttgtgcattttttttctttttttaacttatttgaatttgttattagaatatttgaaggaatttgaagttgaatagattgaacttgatttgggtttgaatctgaaaattttgtgtgtttaccatgatagagaagttctagaaaagagaaagccaatttatgacggctacaagctatcacaaattgtttaataaatttcaaacaaaattttcaagtatttttttacaatttttaaccatcagaaaattagcttcattaaataattaaaaatattacagtgttatgtttagtccaatgtgacataacacacaagtaactcatgtgtcaaactaaaggatatgttagcacttaacatattctgctatcaattgatacataaataaaaaaatttcaaatatgagaaagtagaaatgatttttttatcaagatcaaaaataaaatttgagtatatagcaaaaatcactaacatgtttaaacatttcttaaaatatagtttcacactttcaatgtgaaacatctcactctattttacaagctaatcactcaatttattcataacgcatatcctgctagctagttgataatcacactattcatcccaataaaatggctataaacaagtaatgtacttcaattacttgtagaccccgataagaactaaaataaatctattatatagctacaagaggacgagtcctaccacaataataaaattatgttttggtgacttattaatcatgtgttcaaattcgaaaacaacctctttacatatatcaatcctttatcttataacatatggatttagtcaacggaataacaaataatttaagtctaattgtgctataaaattttcccctttaaattccctttaatagcattaaaaacatatttcaatattatgtcagtcctttgtcttataacatatggatttagtgaattccacaaatgaacttcactaaacccatccccatcctatcattagtcatagatgattagaccaaaagcagtcactgtttatatcatccttcaagaatatttagacataaacatcaccaaacaaaataattcaacaactatgaaataaagttacattcttaatactaacccaagaagatacaatttaatatcaatatcatgatgataaaaaagaaaaggaaagtatatatgaattaaaattaacgggatgaaacgaaacaagtgggggtcatctatggatgatgttgtagcagtaaaagcagtgtacgtacccttaccggtctatgtagtttgtaagcttgcgtttgaccataaaatgaagaaaaaaaataaagcttcacactctcagactcacagagattcacactctgtcattcatgtctagccagtgaacaatcacaatctgcgttttgttcaaaaacgacgccaagctcttcccaccctttctctctagtccatataatatctaaaaaaaaaaaactattttaatccatcaatattttgtaaataagtaacaaaaattatgatttagtttaatgacaataggttcatgagttttataatgttaaattggttctaaaaattaaaggagtttaattggttgattaaataaaatgtaagtattttaaattttttgatattgtgtttaattcttataaagaaataaactaattttaaaatatataatttaatgttaaatcggttcaaaaaatttgatgaaaggaaaaaatcataatactttttatatatttaaaaattaattaaatagacagttttattttttcatagattaaattgttactaatttatatatttaagaatcaaaatataactttataaaaaaattattttttaattgcacagtagacttaattattggtttcttatagtaactaattatatcgcatagtactcatttatggtactcactgttaacatcatcttcagcactcaatgcatgcatatgtgcatattagattcttggccattgtgtcacccaccctcctcacctggaatttccctttacccatgccaatctcttcccacactgtctacggacatagtagaatcactatcgcgtcagaaaaaaattaaaaatttcataggaagagaaagaactatagccacgtgcacttatttgattttaattttttttttatgcagattatgcagttatttatgctcatccaaacgaagtcccaacaaatatataactattctcttagggttcattgagtaaagtggaaaaaacgaaaaatacaaataaattgagatgaaaattataaattaaaattaaatataaaagtgtggatgccacattattttattatttatttatttattctcttttttcttaaacgaacacaccctaggaaattaacaacaatcattggaaatatatttattggtattttttttatttgtttggctactgtgtttattactaaagtttggggaaaaatgttacacaaaattatgataatttattttatgtgttttaatggagttagtgctaaaaaaggaaatattgataaaattggtttaacttgtttatatttatgaaaataaaattaaaataaatttacattgacatgatatatgctttttgacaaaagtgaaatgtacttttattgcatttaagactgacgtgattcacatgaaaggaaaaacttaacacaatttttgaaaacctaacgattatctaaacacaccgtacatgagttggtgtagaatttattgtgtttggataagctttttaacaatttgtttatgatgtttttagagttgttatatttatattttttaattttaaaaattctaaaaattgaaacgttttggtaacatatttttagttctcaaccatgttttttaattgaatttttcttaagaatagttctaactgaaaagcttacgtgcattctttttacaagacttgcgtacattttatagttagtttaagtaacatatataattaatatgaggtagttttacttaggggtatcgatatttattataatcacttatcaaatcgaactcactatttattcatttattttatttattatattgattacaaaataattaattattcattttaactagcagtaataattttataacttcaaaattcttaattagtcattttataacaacaattaattatatttaatggaacatcggatctatgcatacaaatatacaatccctataaggtagcgacctagaggagagatttcgacaattaaattggtcctatttaatgtatgatagttagtttcacctaatttgtatttatgtatgtcactttaaacagaattattttttaagaccagcaaattaatttggagattaccagttgaatttgatagctgaagctgacttctaagcactaactaaacaagcatagcccactactatactgatcatctgattaattctcacgcaacgatcaatcaaattttaatttatattaattgaaaaaaaaaactaatttcatacctaaatcacttttaatggaacttaaattatttctgtgaatattgtaaattatattaataatataatatatcatagtgatagacaattctattgaaataggaaaatagtatatatcaaatgttagtgtaatgtattatattgttagtgtaaaaaccataatatttatattataattattgcgtgtaagatgatgaaacctgataatcaaagtagaccatgtcatatatcgccgctagtccgcccttcctccttttgtgggtcacacattgaaattattaatgtttatttcagtacagattattaaatataaaaaaagctcttaaatacttagacagtgtttattaaatgtttcccatctataggcactctactttgttagcttagtttgatggtattaggcatgataatgggtagggcacaactaggtttagtctcttcattctttatatctgattttgcaagtcttttttgtcatgctctctaaaaaattagactcatatatgttttcaattggggattgagttcttccgtcccgtcttattttcaattctatctttttttttattcataaaaaataagaaaataagatttttttataattagattaaatctattataatatgttaaattgaaattacaagtaaaaattatttgatcttatttatttttaaataatttaaaaattagtgatcgtgacaccttatttatcaaagttgaaattctaagtacttatcaacagattaagtaaaaattatttgttcacatttattttttgagcttaaaatgaaataaaataaaaattgtaaacaaatataaggaaagaaataatttcatgcataaaataattattaatccattaaaattgataatgaagactagggtattgtaaggttataataataatttaaaatatttattaatccattaaaatttattattttggattaaacaaaataccgttgtcctattccatattaattggatataaggtagatttgtgtatgaatgttggcttaactacaaaggttatataaactaagggcaaccaaagtttgttgctctacttctcctttaatgatatgcttgagttttgtctcatttatttagttttaagaagtaaaatggtgggtatttgctaaaaacactttgatattcaagttagcatgtgtttgagtttaagaaattaaagaccaaggataattgcatacttgagagctttaggtgttatcatattactgaattagcacaaataatcagacaaaacttacaaatgatttttgaaatgtttatagtgttgttatctaatcataattaaattttcattttagtaatttgtgtataaaaggcttgcattaaacgacaacatagtcttccaatttaaaactatagttctaatttgataacaataccaaaaatacttaagaaattatatttaagttacatctataactaggtcgaagttgatattggcaactaggatcattcttgggttattgggtttgtattgaatttagcaagggtaggcatgagttggattagattgtattggatctttgacatttttattatccgattcaatcaatttgatttggatcgaaatttgtctagtttaagtctccgatcaaagttgaattaatcagattataatcagatcagattagatcatcggatttattattaaaaggattaactttaaaaggataacataggaaagtgattctaatagcatgcaatttaatacatttaactcaaactgttttttaaatactagtctaatatgaaacatgtttcattccaagttaaaaattaaaccatgtattatattataattatagtaacaattgatcgggaggcttaaaatgaaaaatacaataaaatggaccgcctcaaaagtccaaactataaaggttaaaaaaataaacataataagtaatcaaatgtatcgaattggatttcaaaagtgagatctgatatctaatttgtagttttttaatccgacccaaaccaatatggatttttttcagtttggattcaatgatttgttgaattggtccagattcgtgtcatccctaaaatttagtgaagtgacaaaaataacataagaagggggttgaattgtgttttcaaacacttacaatccttttaatcaaatctgagtgatttgaagttagttcaaaatgaagaactattttagttcagaacgaaaacttaatagtttatgaaaaaatattatattagctcaaaaaaagtttcaagacctttgttgagtgaaaagatttaggtagaaaagacatagttgcaaatttcttttaaaagtagtattatgaagccttgtagacttgtagtacaaaaaccaattatgagatagagatgcaaaaaacgagtaaaaaggaaagggaaagaagaaagtgcatagaggatttttacattagttcaccccaacctttggttaagtccaatccttacaattcaagatgagattttcacatacccaaccagccacctgttggactaatcaaccattggattttcacaaccttccagtaaccaactagacttccaaactagccaactgctagaccaacaacacactggattttcactttgctagccaactgctaggctttacacgagattttttgtaaaacactatacaaatacaaattctccttttacaaaggatttcctataaggaaatgtacaaatctcacttctatctattaaagttaaacactcatttaaggaggtctaaaggtactaatgctattggacccaaaaggatttgggtaccaaaatctcatattgtttatattgcagatatccttggtaggaaaaggtcaggtttaagctggtacctggacagtggctactcacgaaacatgacgaagaaaggtctgtgttccttgacctaaagtcacttgaaggaggagtagttgccttcagaggcatgggaaaatgaaagattattggtatacgtataattgatattccttctctagtctccatagacaacgtcttataggttaaaggtcttaaatatgattcattgaacataagtcaatttttcgacaatggttatattgtgtccttcaacaaagacaagtgtataatcaagacaaaagatgacaagtccttaattactgttagacgacataacaatcgatatgagattgatatgataaatcttagtaatcagaatgtagcgtgtttgttatccatagaaggttgaaggtttagtttggaacaaagagtttggacatgtcaatatgaaacatatttctaaattatccaaaaaggattcagtaaaaggacttcctaagatttgttggaaaacccatcttctctacaaagcatgtcatcaagggtaggcatggcaatggggcagggtgggggcgggtattgcattccccgtccccgcccccgtctttaaaatcactccccgcccctgcccccgcccacattccctgtcaagttttaaaaaccagacccatccccgtctcccgctatttgattaaaaaaataaaaaataaaaaataatgtggtttttttataaaaaaaaataggacaaaaatgttaattaggtaacaaaaaaataataacaaacccacattcaaaatatgagatcataatctaaaaattacataacaaaatcaatcaattcaattaaaatcattatgaacctacatatttaatttcttccaaaatacaatatcatttaaatgtatattatcccaaaattaagtagcacattataagtaacacattcttcaaattaaataaaaaaaaaagaaacaacttaaaattgttcagcaaataaatattgattattcctccaaattagtaccaccatcatcacctaccatttcaccttcataaaagaagaagaacaattagaacaaaaaaatatattatatgaattgacataaaacaagtatatgaagtgacataaaattcatagttataaaacaagtacttctaacttaattattgtatgtcatgatcgcacatgttgctttctcaagtttggcaacacctaagagtcaaatggccaggccttggaagatgcaaatagctgcacaatgtcaaatggaaattccaagcattttagttctttagtttcataaatgttaaataggagctttgaaaaattttgtgctgatcacgtttgaaaaaggttgtgctgatcacgtgtgcaaagcagccaaggtttaggtggtccccataatgaaaatgaaatagctactagcaaagaaacgagaaataaatagactataggcagccactttcccatgacaaagtaacatactgaaatctaaaaagattctaaagagaattgaaaatggcatacttcaagtagaagcataaatacaacattatactacagaagcaacaaaacttgaaaacagaaacatagcagctggtgacctcttctaaaattgctcattaacttgggtaagacactaagacttggcaacctctaatgatttataagataagcatagcatagtccaagagttagtcaaatttaatcacccgaaacaggctatgctatcatatgatacctgcctgcttgccaccttagaattccttcaacaccaccaaatatgccatttcataataatgaatttaatttttcaatgtaaaaactaaatccaagacaaattccatggtgggtttcgatttcttactttcatgttggtcatcttagtcaacacacttacctttcggacactggaaataatactacatccttcccatttttactgtatatggatttaaaaaaaaactatttaatgaaacaaaaaattattgtatttagactaaagtgttattttttatataatactttaatatttgataatatctgaactcaagtcgattgatactagtgcacaattgagaaacaaatccaccctttcaacataaattccatgcatagacaatataagaatttctaaaaattgataaccaccacttgacccttagatacaatatctgaagtccattgttactagtgcaataaggtacacagcctaaagcatatttcaaacgtatcagtagattcgagactgtggttctagtctaaaaataaaaattcacattcaaatttatccatcaataattgatcaccatagaagtaggttataacgtaaaataaactttacttatgggagtcactgatcttgggaggaggttttacttaattactaccccttacttggagtaaggtattcaggctcttatacctctcaaaaagatacatcatacatcacaaagaagaaaaaatatctgacatcatccaaacgattacaatatgcgctggaaattgaaatacactagtgcaccagttctatttcatagcatcagaataactctgttcttaaacctcacaatatgtaccaaaaatccaaacaataactaattttgataaaaaaaaatggagtactaactcccatcttttatttattattaaattaactgatcaacttgctttgttatggaacatttctttttgatttcaaaagtaccaatcaaacataaaagcaatggattccattacaggtaaaatcaaacaaaacatactgccaaccaaccttagagtttgatatcagctatttaataaatgaatatggaaatgaccagaagcaattagtaatcatgttaaacacgagagacaacatcaatattgtataaactcaatacagtaatttacagcaacaaatatccatttggtcttgaacaaattagttgagcaacttgcatgaaacttgaacaaatttagcatggaatcaaaattagggtacctattgcctctttacttgagcgaatacagattcagcaaaccttggcagttaccagcaaacttacaatgagattttttttatcatttgcctagtaccaacaaccagaaggaaaaaatgttggtatattatatacacggccaaaggaaaaataagaatgaaagaggtagaaggatgttgttgcttcataccagacaatcaatatgagaacgagaagttgtgaggtcgtcaacagtggtgcgtgacagtggtgtgggagcagtggtgcttgacggcggtgcaggacagcgggtgcaggacggcgatgccgctggtgcgtgagtggtgttagagagaagatatgagaaggagaatttgagaaatcataactgagaagtgagaagtgagggttagtgggttagggtttccttcttaattcttatatatatacaaggtcatttttgtaatttactctaggggtagggcgggggcggggcggatatcaccattaccaaactcgtccccgcccccgaaattataaagcggggaaaactcgaacccggttaacttggtttttccccgttgacatcggggtgggttcgggctggtacccacgggtccgggcctcatttccatacctaatcaagggaaacaaatcaaaacttctttcaaatctaaagatggtgtttccacttctagaccgttgcaactactacacatggatctgtttgtaccaactagaatgttgagtatgagaggaaagaaatatggtttttatcatagttgatgactattccagatatacatgggtatacttccttgcttataagcatgagtcttttaaggtctttgaaatattttgtaaaagagttcaaaatgaaaaaggatttttttttttttatctcttctattagaagtgaccatgggactaagtctgagaatgttgaaaggaaaaatagaactttgcaagaaatggttaggaccatgctctgtgaaaactcactccctaagctcttatgcgcagaagcagtaaacacaacttgctatgtacaaaatagaatattgattggacatttgataaaagagaatccttatgaattatggaggggaagaagaccaaatatttcatagttccatccctttggatgtgaatgttttatccttaacaccaaaggtcaagtttctaagattgattcaaaggtggataaaggaattttcctagggtattatgatacatctaaagcctataaagtcttcaacaaaaggacttccgttgtagaagaatctattcatattaaattcaatgattgactaacgtctgataggaagctattaaattttgaggatgattttgaagataaacaaattggttcgtctgttgcacctaaagaagatgaagacaaacaatttgatgaaatattttctcagaccgaaggatcatttgatcaacaaccttagacaaaggactagaagtttattcattattaccctcaatatcaaatcattggagataggacaaaaggattcagaagcaaatcatcattcaaatatcttatatcctgtgcactcgtataagaaatagcacctaagatgatagatgaagcactgacaggtgataactggattgttgcaatggaagaagaactccaccaattcaccaaaaatgatgtctggacacttgttcccaggcctgaaaagaaaagcattattggaacaagatgggtgttaaaaattaaactagatgaacaaggtaaagtggtaaggaaaaaatctaggttagtagctcaagttttgtaacaccccgtgtgcacccgatgtattaacattattatttattatcagattagcgcttaatcactttaattaaaaactttgcggaagcataaacgaaaaccatatttcttgattacattatgtatggaacatagagcacctcatcataaacgacacaaacctctgctgatccagaccacataaacataaccataggcagataacacaactataacaggagaaacatcattacataacataaactggttatgtaaatacacatcatctgacactcatagtgtctatacaaaagaataagcatccaagtgcttttgatctcacagatccttcctcacacgagggcatacaaggtctatacaatacaaagcaaaacgtatgtgtagacacacacatctcccctctacaggggtacaaagccatcaagaatcaaaaccgagctttccagctctccctgctgccacccggccaagcagacactgtctctactggggcctcccaccctgagaccgctcctctctgccagaagagtcacctgaaataacataagccccacacgggatgagatatacatctcagtaagctcagggtccttggaggcatctcctccaccttggctcactttccatgacacaagtcatcaggcatcacaaacatactggcctcccggccctcataacaatacaagcaagtcatctagctctaatgtaaggtggatctcatcaacaccaaacctcagtgtgagaccggaactcacactcgtgccatcccatcgggagctaccccttatgcatggacgcacatatatggtacctccgagaataggcaatcaactgcgacgggacacacctatctcctggtcttaagggatcatcatcaccctgggatctcatcaaccatgagcaatccaaactaggaggtgtgctcttctcctagggaggtccatatctatctaattggccagaagatctaacaacaggtatcatacatatacaagcatagatacacgcatacttatcattatgagtaatgcaacaaccatcaatgcatgcatcatgaatgcaaccatcactccctcggagtatggtggagtacaagcagtgggaaacatccctaagggaccaagaacttacctggaaaagccgagctctgcagttcttcccttgctctgtggcctacgccactgacacccgcggtgtcacgccctatacaaggcatacaatcacatatcaatcatccatacatccatatcaggcacaaacatataacacggttctcaaccgtctcaaagaaaggaatcgcaatcctttccaaaaccacaagtcctctaacttaaggtttatcaaagtccatcaaatcatgtaccacatatagaacctctgtggtctagcttggcctagccaaagcactagagtcttcacaagactcagtaaaagccaacaaaaagagccctaagctctatacaaaccatagctcaagaatcctcattatggcttgaacggttcttcacacacacaagacatcattcccacagcctctcaagcacaacaaagccatataccaaggctcttgcatgttacaacatagccaagcaactcagcatactaatatacatgcatcacatagagccaagaaatcaaagttcaccaaactaacatttgagagctaatccttcatactcacaacattctaaacacatgtttctaaaggacccaaggctaatactatctctatcacaagtgagtcactattcacccaaaaccccaacacacaaatcaagcggtgaatctcgagtttcttacctcaatgacgacaaggaaggcccaaggacgacttccccaagctcgggtatccacgaatcgccgtcgttcctcgtcgaactcgagttctacggacttcccttgagaaagggattctcaaatgtggggtttctaaggggaatatgatgaaggattcaagctcaccaagtgtttcccaacaagattgtggttcaaaggaagtgatttggtgaactaaggtgaaggaatgaagcttggagcttcaacaatggttgcaggtcgctcagaggaaggagaaacaaggttttctcttccaaaatcgcgacccaagcccttttatagtggtcttgtcaaagctgtcacgctgatcgtgccactctagcactgatcacgccagctcccagaaaccatggcgccaaccgcgccaccctcccgccaacggcgccaacctccaggaactatggcgccaatcgcgccactcccgcgccaaccatcagggatggacaggtctccagagctttcttgtgccaccagcgccactctggcgctaccagcgtcgaccttcagaacctgtggcgctactcgcgccaacacggtgccactcgcgccaccctccaggggtatggcgccactcgcgccacaacccagagagtatggcgctgatagcgccactctggcgccgatcgcgccacatctctgcaactggtttctgcagaagaattatgcagaaaccctgggctatctgcatagaaacttgcgccgtccgcgctaggactcagggtcatttataaccaagaagaaggtatagatttcacataagcctttgctcatgtggctagacttgaagctatatgaatcttgcttttgttgctcataaaaacataaatctttttcaaatggttgtaaaaactgctttcttaaatggatttattgaaaaggaaatgtatgtcaaacaacctcctagttttgaagatcacccttccagaccatgtttttaaacttaaaaagactttgtatggtttgaaacaagcaaattgtgcttggtatcacagactaagctattttcttttagaaaatagttttatgagagacaaagtatataaaatattttcagaagataagttggcaagaattttattatagttcaaatatatgtggatgatattatttttgtagctactaatgaatctctatgcaagaatttctctaataagatgaagagtgagtttgaaatgagcatgataagagaatttccaagttctttttgaggctttatatcaagaaggaaaaaaaagtatatataaatatattcattggcaaaaataaacctatttgctatcaatttttccaacaccttacgcatacatttgataagcaatattaatctataatcccaaaccttttgcggttatcaacttatggaccaatactatatgaaggaattattagaccttcttaccaacctttgatggtctccaaaaactgtatgaagaaataaaaataaacctcatccatcttgggcttttggagttttcacatcctaaacatctccctttatttctttttccataaaaagtgttgttaacaaatccttttgcaaccctccaatcattttaaactccaatttctcttgctgaggtcttcccatatttttattttgaaattttccttggaagtgttgtttgacctcatttaattgtattacatttgaaattgaaaaactattatacattcgccctatatctcctattaatgcatccataaaaagatggaatttgaattccctctataactttggtgaggatcccctctataactagcacaaccttatttttgccacaaaacactatattacttttctaccaatcaatgaaattaggccaaacattcctttttattgttcactatttttatggtcaacgctaaatttttctcactaacataccattatataatttgttctttccatttatacaacctttgtgttacatttccaaagtgttttttatttcatattttcaattgttttttatatataaatttcaatttctcgtgcaacacttatgttgcccaaccatcaatatcaatagcctccaaatttctaagcccttacaaatttcacaatcccaaaatgttgtttggatctccttatctaaatgctacaaacaactcatgattttccaatatactattatgagaaattttcatatgcacaagttgttgcctgtcccatttcctactcataaaaagccagaaatgttgttttgtttttatttttattacttgtaccccttccacatttgtaccttcaaaatttatatatacataaaagctcttctccttcttctcttatttagtcccttatgaaaatgttttaaatttgaatactctaccttatgcatcttaaattattattgggcttaaataactttttggtacctataaaataaggagtgttttaacttttctatctaagttttattttattgtggtacctgacaaatttttatttttgaaataggtacctgttattagggaatctccgttaactagtgacatgactatagagtgccatgacatcaagctcaagttggttaaaaattgttgactcatcaaccaagtcatttttgtggcaattacctttttcaaaaataaattttgtcaagtaccaaatctaaataaaaaaataaaggttacatacactattttattggtaccaaaaagttatttaaacctaatataaaaaatgttagttattgtcatcaatgcatcaaacaaatttttcactcctttcttcttcctcttccctagtatggcactcctcatctctaaaaaaaggttaattatcttcgtcattgtcatattatgtgcaattcaactcgccccacttaatgtttctcctatatacgttgtattcgttcattccaattcatacaaatttctatcatctcttacttttactaccaacaacaacataagtatgagattccgcacttattaagtaccttctcaggttaatttttgtctccaatgttattttttttatttcattttcaacttgctctccaaaatcaaatgcttctagctactcaaccataggattatgttatagctcatgacggttgtcgtctaggccattgccaaaatctttcaagtgtccaccaacgataaggtcgtcagagatgtcttgggggtttgaggagtatctagccaaggaagaggaaaaagaagaaagggaagaattcatatggtgcaatgaaaacaataattaacattttttattttaaacaaataattttttggtacttataaaatataaatttttgattttggtaacaaacttttattttttttattatttgggtaactaatatatttttattttaaaaaaaggtacatgccatccaagacttgattgttgagtcaatattttttaggcgacttaaacttaatgatttagcattctattaatcatatcatcaataatgatatatacttattttctaacggtataggtacttctttcaaaattaaaaaagaaattgtcagtatcaaaataaaataaaaaaacaaaaatctcaatttcctaacatccttatttcaaaattaaaaatttgagagatactaaaataaaaaaataattaaaaaacttaggtaccaaaattaaaatacccctattttatagataatgaaaaattatgtaaaccttattattgccggaaaaaagttgttatactattgacctttcttggctaaatattcctcttaaaattcttctattaaaagttgaatcataaaaattacttctcttcctccaacagcatatcggcgtcgttgaagtaaagttcactttttaagacaaattaaataatctaatcatgcttatacacaattaacataagcaattagattaagtgcggaaaaaattaagatcataaatacctcccgccattgttattcttgtttgctccgaagaggatttgcagttatccatgatccaagtaatctgtaaacagtttatgagtcttcaaactaatctgacttttttcttaaagatcttctatgctttcactattactcactaatggtgtattgagattttcagatagcaagcacagggacattggccatggtgcacatctccttttataatctctttccatcagagaattattttttatatgcataaaatgtgggcttagttgctaaaaagataagggataagattagcaacaacttattcctaaaagataagggataagattagcaacaacttaatcctaagaagataaggtgagtggaccaccttatgtggttttgacttagtcaatcaataaaaataaaccaacattctcccacttggtccacatatcttatcatatactttagtgagaaataaaatacatgaatcatgacaatagttcctctaatatatatacgagcagtattttccatgtattacattgcattatatttctcaagcctatacacactactacaggcgacacatacgacgacggttctaaaccccatacaacgacggttctagaaccgtcattgttgcgggtgtcgttgtaagtcggaactttcgacgacggttgtcaaaaccgtctttgtttctttattttttttttttgcaaatgaagataagaagacggttctaccaaaaccatctttgtaggtgaccatacaaagacgattttctggagaaccgtctttgtttccctattttaaatattttttattaaaaaaataacttaagaagacggttattccgaaaaccgtctttgtttgtctacttacaaagaagattttgggaacaaccgtctttgtttctttattttcttatttttttttgcaaacgtagataagaagacggttctaccaaaatcgtctttgtagatgaccatacaaagactgttttctgaagaaccgtctttgtttctctattttgttaatttttttttgtaaatgaagataagaagacggtttctaccaaaatcgtctttgtaggtgattatacaaagacggttttctgaataaccgtctttgtttctgtaattttaaatttttttatttaaaaaaaagttaagaagacggttattgcaaaaatcgtctttgtttgtgtacttaccaagacggttaaagcaataatcgtctttgtttccctactttgttaattttttttgtaacaacatctacgaaattagtttctatttatactaccaaatgaatttaaaaaatacaccatgaaggaattttattctataaaattaaataaaaatcaaattgttagtacactaaaatgtgcaaattgttattttaaaccacgtaaagaaaaatgtgcaaatttgacaataaagaccaagagttaagattaaaaaaaaaggcctctaatcatttgccgccccacccccaatcctgtacccagtataatattgggaacaaaacaaaatttcacctcttaattggcagttacctcttagctggcagtaccttttgctttggttgggcagtatttaattagacaggattggggacagagggttcaagtccactagaagatggcatataaagttaaagccatctttgaaatatgcctaaaatgctcaaacagaacacaactaagatagaaaactagaatatttattccagaaatgaggatgataccaattcttacttccagagaaaaggaagaaacataaggttttgtggattcagcctctatgccatctaattgccaaacaatacttagctgtgaagaagcagcaaggaacatatccttatacaaaaggctcattgaagcagctcttgcctgtatcctcaaattgccagcatcgttccaatgtaggtttaacaaatcccaatgcaactttcttagcgattttgttgctttcatttttcccacctgatgagttaggacccgagcaagcttggcaatcagttattgtcaattcactcagccacacaacctatttataaagtagagagcactttctaatatgatagcatcatctattaacgtaatggagtgttcaacttttattcctagacaatttaaattacttcatgcaagataacaaggcagggcatggagtttggtttctcttataaaagtaaacactaaaataagaataggtcaaagatatcacaagtctgacttaaataggcagagtatgacatggttgatagttgccatttccagttatatggtaagatttcaagttgttgttacctcaacaccccatccaagtcttattaggacattaagatcacaaactattatgtgtatgataaactctagcacctgcatttaaggctacagacactactaaagaatagaacatggtcctatacagttgttgatgtgtgtccttccttcattcttatacctggataatcagagttatataccatggcccaactctataaataatgtcatgtccactactcttgtataaagatctctagcctttttaactatagtaacaaaactcttggtcttggagatagttgactagaatgcaaaaattttattccaaaactgtaaaccggattatatgcaaaaagtgatattgaacaataagaaggttaccatgtatttctcataagccattatgacaagtttgtcaagagcattttgttcaaaatccctattaatcaagatattgaatttccaataagagctatatgagccacataagttaaaattaagtaactaatcagggaacaaatggtggacatttacttttcttgaagttcttttgtcactgaagctgatttcaataatccatctagcaagcatttcctcttggacatctacgatatatatgaaaataaaatcaaaaggtgaattatgttagataaaataaataacttcattaggttctatattatatctataaatcagatatctggatcttaacctgatatgtatatttacataatacttgaaaagcaacatgcaaattttcagagaagttacataacagatggaaaaaaaaacattggggaaagaacatttagatgattagaagttagaacattatagcttggcttcagcatcaattggtacctgtccttggtaatgctcctctaacctagtgatatcctcacaaattccttcaccatctgtttgcatcatttcaagcttgaaaaacaaaagtaaaaacaataagtacatactaatcttaatctacacagcaaattttacaataacagacagaacatcttgaaataaactcattaggtctattgatgaatagactgctgaaggaactacataataaactagaacaaaatagtttaatcaaatctgatattgatttgtcattgttccccatagtatccagtgacaatgcagacatagcaaccctgtaacagaagtaaaatgtgcttagtagaaaagggctagcagcagttaagatagccattttcaaaaattggcaaggttgccaaaggtataacagagggaagatgaaagcagggacaaaaaagtatttacatcactagagaaaagttcaataaaaaaactaaacctaagattcatttaagttggtgaaatttttataggaaaaatatccttagttaaaagtggaaagtgcaccttgcagagtaaagtgtggagttaatcaataatcatagcaaaatctttttttttaacaaaatacaggcatttaaaaaaaaattaaggacatagcttattgatcaataatcataggaaaatctagtttacaaatcattgcttaccatttgcagacaactctttttaacatacaccctacactatcaaggagcaggatgcatcattaaagagagaaaaggtacttcacatgagaagcaagaaacatggcattagaatcacaggtagctaaacaatatttctgaaactttggtttttaaccgtgtccaatgacgttgtgttatccatgtagccgaatccacttagtgagataagggtttgttgtagttgtagtgcatttgacagtaggagaaactaaaaacctggaaagtttctcaagcgatgcaacagctgaggcaagactaaatatgaaacattaagaagtcagacatgttttatagggaagaaacggaaaaaacacactttaaatggtaaggtgaattatttattattttctccctattttatctttaaatttgttaaaaatactaaaatattattaaatttagaaatggtgcgaggtacttcaaagtagtccaaactaaatgagggaaggaagtgagtagattagttaccttttggtatacaacagacaaactgttaaattcatcaaatatgtgatctttgatttcactgctctgagtatcagcaaatactgaaactgcttgctttggagggttaaccacactttctgccactgatacattgtattgcagaagcctgtaataaaataaggccctatcatgaacatcctgcaatcaacaaaaagctcatttaacataccacaaaatattcaaacaattcactgttttcacaatacaaagtagtaactagtaacaacaattgaaacctggtgaaaatcagcaagtccagcagctaatgtagctcctaatgctttgagtttcaagtggtcgcttaaagaaacacttcataactgcaataagaagatgtaagcgaacctacatcatgagacaacagttattcaaaatataaataagcaagcataaatacaagctaatactccattcattgttataaagtcttccatttgaaagtaaaagtgaaaaagaattcatcaaagcttcaggattgtgtttagaaaaaaaaatatcccgtgaactccatccacaatctgtgagatgagaaaagctcaatgaaaatgaaggaaagtagtagtagtagttatggtttcagaaatcaatgaaatttcaaaagtcattgctctaattaagaatggaggaaaaccctgcacctcttgagcagaaccatataggatgatattagccattagtaacacactattcacatcaccattcaagccataatgccttatggaaccatgaggaagtgcgttaaaattgcatggcaaattaaatgatgctaatagagttgatattggtggaggaagtgcgttaggaattgtccctgtggtatgcatgagacttagaaggctttgaacaccctcatagctcaattcctataaatagataaaaaaaaacagaacaacatgatagtcaaaacacttgagtattagttaattcacttaagcatcataattcaccctcatacaagaaactttaaatattagttcacttgcagtctggtgaaacatgaacacaagtacaaaaacattagtatctgcgattatctgtttctgtccctcttatgcaacacatcaaagtatgattatattaattactatttactaagtaaaccattttttttcagcatatgaaataaataccatgatcatcaggaagtaataaaaactaacaaatcaaactaataattaatcattaggacaagatggaagcagtcttttaagagagttgtagatgattttaaaatccagtaagagattatggtatcacaggaaaatgaacccacacagaataatctagccaaagaattgtatggttgaggggtgaattttgaaacaacgattgcaaggacaccatttacttgttccttctcctctgtgtaagatctccgataaacttttaaacctgtaattctatgcaagtgttcctctgaaaaaatcattataaaatctggaattgatttagaagtaacacaaacattccagatggtgttgaacagagtgatcgataaaatagaattatttaaaaacatttacctgaagctgggggtgatcaatcatgaagtgaatgaggatatgcctatgccatgatgttaacatatttctaaagactcaattattcaagaatcatgagaaaatagcagcatggaacagtgttacccaattagaatttgtgtgcctgagtgaagttcctcttcatcatatttagttctattagatattcctagatggctgaagatgtacaactatagtttctggatggttttcttacctcaaacaaacacatgaatttaggttttccagaaacatgattcaaaattgatgagatgaacaatcagtgatcttatgctatacataaaaggtagagtttctatacaaagaactcagcacatcactccgaaaaagaaaaaaaaggaaattgatgacagtaacaagagaacttatgaaaaagggtagaaccaaaagatttaatgttgtaaccctcattattactataggtttaatctatcatttccttccctttcttcctccacccttatttttctctcccttgaacatccacacataatatatgaaatattataaatgcatactattttaacgtgatacctcaaaatgcaaacaaaggcacatgttgacttacctcaaaatcaacaaatgcaacagacattcctcctctggaacgcattttgaccatgttgaatccagtatatctgaaaagatggattaaagacattaagttatatgatcatatcaagtagatgaagaacattttgtggaagatgtgcggtcagacacaaaaacaagagggccaagaatatgaaacctaagttccccatgttgctcctctccatattttttcttttctaatctcactcaccccatttaaattgaaagaaaaagacaattagctatgagtgcatacaataaaatggaaacaagctagaccatagtcatttcagaatacacacacttcgcattgaacttaattaagtaacattactgtcatcacttaatgatccctgaagaccaggctctcctatggaccttttatctataaccacatcgactccatcacctgtgcaaaataaaagtccgataatcatcctataaaagcagtaaatgcatagattgggggggggaaatggaagaaaagttgcttaaataaaaaactgcatgtaataaaaagtgaaaaaactgagagaagatatctatatgctatatatgcctaataacaagcctggacataatatatatacccgatttatgcttcctcctagagtttgacctggcaagttcaatatgtaaaacatatctagtttgacgatcaatttcacaccttgatttcatcaacgaaaaaatgagttagttaaaagaccaatttctataaactgcaaatatcttctcagtaaaatatgctcaacaatttcttgtcacactccatcataaatcccactaactcttacgatttccttgagtatttgcacaaggccactgcaattttcacttaaagttttgtttggataaatttctcagtatacacttacatgagaagaaaataagaagataaaatgacttaaacttaaattacctcacgcataggttaagatcaatttttggaaaagctaaatgagagagtttcaatttcaatgcataataataagtaagtgaaaaggaagaactcatgagaaggaatggtacctggttggcgcggcggtgtacttgagttggcaagagtcaaagctagggtggcagtgaaagaggttgtgaatctcacgcgccttcacgtcgtttggtacattggagacaaatagcgtgttgatgttgctctgctcatcataatggtaaaggtagtacggatagaacggcagctgagccatgagcgtcgtcatctgcggctttgaatggcgatggtggacgcctctgccatgacgatgacagaggggactgctgcagaatggaaaggaccctctggcccaacagccggagcacgaagtaaagcggcagcacgtcaacgttgtggcgggtgatgagggaagggaaggcttccttgaacgggacaacctcggactccacgaagtagattgtggggggtgaaactgaaacgacatcatttggggagaaggagaaggttacttggacactgatgttgtcgcaggaagagagaacaagtgtgagtgccatttgtaagagaggatgcgaaaatgaaagcaggtgagggttttcaaagacgaaaaaccaataaaccatctttgaacatttttttaaaaaattaaacttttaaataaccttcgaagacgattttgtaaaaccgtctttgaaccctcatcttctaagacggttattataaaaccgtcgtcgtaaatctcttattatttacaaaattgccaccgtgtcacattcaaagacggttttctaagaaccgtcttagaatgtgcgtcattaaaggaccctttggtagtagtgacaacttaatgaataaatcaatgtttattctaggtccaaacttaattaatgtttcttaggataaataactgtagatgcgcataaactgaatgaaaaacatcacaatagagtttcttaatatcattcttacaatgaaaatcacatatgggaaccaggtctcatccttatacttgatccttaaatttaaatggtggcatgcccttagttaaaggatcgacaatcattaattcagtgctaatgtgctcaataaccaatgtattatctttagcacgttctcttatagctagatacttaatgtcgatatgcttgcttcgactaaaacttttgttattcttagccataaaaacaacagttgaattatcacagtatatcttcaatggcctagaaatggaatccataactctaagcccaaaaatgaaactccttatccatacaccatgtaaggtagcctcaaaacaagaaacgaactcaacctctatagtggaagtagcagtcaattaaggtatgcctgatacttctccaagacgcagctccactggctaacataaaaatatatcccgaagtcgattttatcgaatcaacgcagccattgtagtttgaatctgaatagtcaatcacttccaagttgtcagtccatctgtacacaagcatatagtccttagtttcctaaaggtatcttatcactttctttgcaactttccagtggtcaaaacctgggttactttgatatctccttaacactccaatcgtaaaagcaatatcaagttttgtgtagacttgagcatatataaggcttccaacagctgaagcataaggaatattcttcatttgttcccgctcaagatcatttttcgggcattgacttaaattaaacctgacaccgttcataattggagcaacacttgttgaacaattactcattctaaatctttccaaaaatttgttaatataggttttttaagacaaacaatgaacaccttttactctgtctcttgatgccaataacgtaagaggcatcacccatatcctttatatcaaagttcttagagagaaattgtttcacctcatatagcaaacccttatcatttgttgcaagtaaaatatcatccacatataaaataaggaaacaaatttttctcccactgaccttctggtatatacagagatccataacattttctacgaaaccaaatgaagaaataacgtcatgaaattttaagtatcactgacaggaggcttgtttcaatccatatatagatttcttaagcttgcataccaattgctcacccttagtagaggagaatccttcaagttgtttcatataaaccttttcctctaggtctctattgagaaaagttgttttcacatccatttgttgcaactctaagtcaaaatgtgcaaccagtgccagaatgatgtgaagagaatctttcttagatacaggagaaaatgtctctttgtagttgattccttccttttgattaaatcttttggctacgagtcttgctttatatctcccaatgttgcctaaatgagtctttcttagaaagactcatttacatccaatgacttttgcatcattaagcaactgaacaagatcctagactccattcgatgccatagagttcatttcatcttttatagcatcatagcacaagttttattctttagaactcatggcttgtgaaaacgtttcaagatcattttcagctccaatagtatagtcagattcctgtagatacacaacaaagtcactcggtatcgctgatttctttattctggtagatctccttaatgttgtttcattattttcttgagtaacttgttgttcaattggttgatcaacaatttattcttgctcctcatgaacaacttgatcaactagattatcagcagattatagatcttgaatgataggttgcacaacacccggttgagctggaagggtattgttaatgacaaccaatctaagatttgaagtgggtggttgagtaactgaatgatctttctcaaaaacaaaatctctggattgatcgctcccactaatcaagtcattctaaaaaaattcaacatttcttgattccacaatccttgtactatgaaatggacaataaaaactgtatcccttagacctttcaacatatccaatgaagtatccaccaatggtccttgggccaagcttattttcttgtgggttatagattctcacttcagacgggcatccccaaacatgtacttgttgcaaactcgatttccaactcttaaatcactcaaatggtgtctttgggacaaccttagttggaactcaattcaatatgtacattgccatctttagtgcttcagtccacaatgacttaggaagcttggaaatactaagcataatttgcaccatgtccattaaattcagtttcttctttttgcaacacctttctgatccgaagaaccagacatagtgtatgggcaacaatcccatgttcttgaagaaacttcacaaatagatcaggtgcttgtctattctccatgtatctaccatagtattcaccacctctatcagatttcacgaacttaatttgctttccacattgtttctccacttcggccttaaaaactttaaaggcatctaaagcttcatctttagaacgaagtaagtagagatacatatatcatgaataatcgtctatgaaggtgatgaattatttcggactacttgcgtccatgtttggacaacaaatatctgtatgtatgatttctaatagatttgagatcctctttgcaatcttcttagacttgttagtttgcttacccttaatgcaatctatacaaatatcaaaatcaacaaaatccaaagcactaagtaccccttcatttaccaatctcttaattctctcgatagagatgtgtcctaatgttaggtgccacaacatagaggaatcttcattcataacacatcgattcatgccaacattaacatgcatagcatcataagtggtatcattttgcaaattaatatagaaaagaccatattgcatatcaatccaccatgtgttatgattaatcatattagattcataacaaactaaataggtaggcatacctttcttttccaaaccatagattgaacttaggacaatctttcttcatgtgtctcttccttttatagaagaaacacctggattatttcttaattccaacttgaggtggtatttaccacttcctttgttcttatggcctttctaattatccttcctttcaatcattataagagaactctctccttgttccaactgcaactttccctcttcctgaacacacatgatcatgagttcattaataaaccatttatctttatgtgtgttgttagatattttaaagggaccatatggtgctgggagagtattcagaataaaatgcaccagaaaggagtcagacatgtccacctctagaggttttagttgagctgcaatgtccctcaatgcatgatgtgctcacgcacacccgtcagagtattgagcttcatggaagaaaatttcattaaggtattggccaatgccttccctgaagtctcaaattgtttatcaatgtacttcaggagcactttcacattgtcatactgttcaactgaacccttaatatcagcatgtattttagtcttaatgaacatcttacagaatcagttgaatctttccaatactcatacagatccatctcctctagttcacctttcactataattgctggtggctcaactttcaagatagcataatcaatgttcatataccctaacgtaagcaaaatcttttccttccagataaaaaaaaataatctcctcttaattccgggacaaaaattgtattaataggttgtatagttgcaaaataattcaacatatatgcttatcattaaaatttgagacaaaaataatgtatcatgttttaccaatgtaactcatgcttataaaattatgaatttagcgacataaaatttgtctatgggctaaaattttaattcaattaaattcacataaacattatgataaaactatcaagttatatttctttatccctatggacaaatcaaaaaattataatttaatattttatgctaatgaatcatacaaaaatataatagaaattcttgtgagataatatctactatattatattatgattaattacaattaatattatttaccttatgtgatctagaggctcttaatatataatttaaataattaaagttgttgtggctaggctttaatcaattaaattataaagatcactaaatattatttaatttccaaaattaattttattgtaattaaccataaacaataaaattaaataatcaatcatttagattaatcaacttaatattacatgtataggaaaacataaattaatacatgtaatgacagaataacaatagatcatgtgaatatatatcacaaaatattctcttataaacacaaattaatacatgtagtgagtgaagtaaatggaccacattaagaaaaggtttccctaaaagatataaactgaatatctaaacattcctatctttatgaaataatatatatatatatatatatatatataaactgaatatctaaatattcttatctgtatggaataaaaagatataaactgaatatctaaatattaatatctatatggaatatggaataaaagatgaacacatcataaaattgtcattagttcaaaatgctttatagtcatttatttggttcacgaagatcaaaataaatgacaatagtaacaataacataaataaaaatacaattcagtgtcagaatgtgaaattttcaaatcataaacagtgtcacacaatatcactttaaaccaaatgtgaatgtgaatcgtgacacaaaaaccaagatttaaatatgggttaatttcacaaaactcaaagccacgaaattgaaatatgtttcattgatactattgtcttcaatcttcagatgggttgactcgacccagtttcaaccaaaataaaaatccaatgattttctcagtcattttcaatattgaaatccatgttttaatttacagaaagcttagaaattcaatttccatatgattccaaggcttcttaataattaaacgttcaaataaaatactcatatttcaatgaaacaatatttcacatacatgagtgtcaaacaaaagcaagacagaggcaataatggacgctaataccaaatttaagaaaaattaaataatctaatcatgcttatacacaatcgacataagcaataagattaagtgtgaaaaaaaattaagattgtaaatatctcccacaattgttattcttgtgtgctccgaagatgatttgcagttatccgtaatccaagtaatctgtaaacagtttacgagtctccaaactaatttgacttttgccttaaggatcttatgtgcttttactatcactcactgatagtgtattgagattttcagatagcaagcacagggggcttttttatccaaagggggtaaaaaattaagttatttacgttttgggggtaggaaattttttatttctgtaataggggtaagtcgtaccagcttgtacgactttgcaacagatttttgttaccccgcatgtttttttatttttttaattatatttaataaaaaataacataagtcgtaaatatatttacgattttaaagtcataaatatatttacgacttcaaaatcgttcaatactctacgacttttcacttcgttttcaaattaattatataatatatttgaaattaattaaattacaagaaagcgtaaatatataaagtcgtaaatttacgacttcaaagtcgagcttatacagatcatttatatgaagtaattaattatttaattgaatataatttaaaaataaataatttaaaaagctttttaattagtttaatattttttattatttgagtaatttgagaaataatgtatttgaaataatttattatttaatttaatataatttgaaaagaaataatttaaaaagtattttattagtttaaaattttattattatttgagtaattgaaaaatgtaaataaatttgtttatattggagtaaaaaattataaatttttattgttaaacaaaatttaaaattattggttaaattattttaaaaaaatatgtaatattaaaaattataaaatcaaaattaaatttaaaacaaaaccaaagggggtcatggagtatcacacgacttcaaagtcgtggatctccattcgactctcataagaaaaagaaaaagcaaagcaataagaaaagaaaaagaaaagtaaaaaaaatggaaaaaactaaaaattagaagaaaaaaaattaaaattaattatgataatttttatttaataaatataataattttacttaaatatgataattaaattttatagtagtaattgtttgaaaattaataaacttgtaaactaaaataaattaataaatatataaattttattattataatatatgaaataatattaaatttgttaaataaaatataaatttaatacaaataaataatacaaatataaaaaatataaaaactataaataatattcaattataaaaatcaaataacaaaataaaatcaatttacaaaacatatatacgactttaaagtcgtatatatgtttacgactttaaagtcgtatatatgtttaccactttaaactttaaagcctttgctttttacaccccaccccacgttattttgtcttcctcgtaccaaaacccctgtccaattagctacatcatcaatcactgaggactaattagatgacattcaccacaaaattaatcatctaatacaattttcattttattaatcaggaccatgaaagaaaagccaagaaagtgagactagttttttttttctttcatcttacaggtattcatcatgtttgattaattttaaaagggtagaaatattgtttgaatatttttttgtaatattagacttattttttgttatatgaagtaagacatatgttgaattatttgtatatatttatttattttttataaatatcattatattaattaatctaaaattatattagattaatagttaatatattaaaatcaaataaaataatttcataatttcataatattaattgaatatgtttcctaaacacattaaataaaaagattaagtaaacttatttaaaaatatacaaaataataattaaactagaaaaaatgggggtcgctgagcatcacacgacttcgaagtcgtcgagctccataccactcccaataaaaaaagaaaaaaattggaaaaatggaaaaaaatgaaaaattgggaaaaataaaaaattaattatgataatttttatttaataaatataataattttacttaattatgatagttatattttatagtaggtattgtaaatttaatataagatgtaatttaaaaaatgttgttgtttaatttaatataatttattatgttaattaatcgcttaatctggcatactgatatttaaaaaatatcaatagaataattatatggacgatgaaaattatattagataagggcttgatatatttaaagatgttgtgtaaaaaattaatcatttatttaatgaaggtgaaaaagtaaagaaaagtagaaactaaatacaaattagttgtccacttctttgtatggacaattacgattgtatcttatttttattgttattattaacgattatagatttctaaattctttgtttacagtcccatgttggccatcaacaccatcaatcacatgctgacccaaatatacctccagtgcatgtttctagatttatgtctctggacacatacctcaaggtttttaacaacattcattacaatcggggttctcatcgtatgtgcctcagtattcattccaagctccttctacgtcaaacatttttgaaggacacccacagaggtttggtaccactttcaacactccgccatcagcatataatccatcaccatcgacatctacttattgtccgacattacctactcaaatgcatgacatgggtcatgatgacgatgataatgaagacgacgatgataatgatcatgatcaaaataatacaaccaataatgatgatgatgataatgatggcggccacgatgatcatgatattcctcagcaacaacaaatacacacacgtgatcatcgtagaacaaggggaagaggtggtagaacaagaagaacaaacccagacccaaatccagcacatcaacatgaaagacctcgacgcgtatctagaagaactcgttgtggaacctcgtcacattattaatattttcttttagtgactatgtaattaatttaaagatatgtttataaacatatctcttgcgtgtgttgcttcactactccctttcttattttcttttaaatttaattattcaattttccttttttaaacaagtttatttaatcttttcaggtaacatttttaattaatgttatgcaattatgaatgtattttatttcattttaatgtatcaactattcatcaaatataatttaagattaattaacataatgatatttacatacaaacttataaaatatgggggtgcagctagtaatcctttatgatattttacgctttcaaaattaaattttggactataaaataaaaatcgtggtgtaaaaagcaaagctttaaagtcgtaaacgtatatacgactttaaagtcgtgtatatgttttgtaaattgattttattttgttaattgatttttataattgaatattatttatagtttttatattttttatatttgtattatttatttgtattaaatttatatttttatttaacaaatttaatattattatttcatatattataataataaaatttatatatttattaaattattttagtttacaagtttattaattttcaaacaattcctactataaaatttaattatcatatttaagtaaaattattatatttattaaataaaaattatcataattaattttaaatttttttctaatttttagtttttttccatttttttacttttctttttcttttcttattgcgttgttttttctttttcttatgggagtcgaatggagatccatgactttgaagtagtgtgatactccgcgaccccctttggttttgttttaaatttaattttgattttataatttttaatattacatatttttttaaaaataatttaactaataataattttaaattttgtttaacaataaaaatttataattttctactccaatataaacaaatttatttatgtttttaaattactcaaataataataaaattttaaactaataaaagactttttaaattatttcttttcaaattatattaaattaaataataaattatttcaaatacattatttctcaaattactcaaaaaataaaaaatattaaactaattaaaaagctttttaaattatttatttttaaattatattaaattaaataattaattacttcatgtatgagctcgactttgaagtcgtaaatatatttacgatcttgtaatttaattaatttcaaatatattatataattaatttgaaaacaaagtaaaaagtcgtagggtattgaacgattctgaagtcgtaaatatatttacgactttaaaatcgtaaatatatttacgacttctgttattttttattaaatataattaaaaaaaataaaaaaacatgcgtggtaacaaaaatctgttgcaaagtcgtacaatgttataaccatgcgtttaaatctttagtttttggcttttctgaggttccacgcttggggcgtgggggtccacgccaggggcgtgggaaacagctcagaaaaccaatttcatctggagtcccacgcttggggcgtgggaacccacgcttggggcatgggaggtccacgcttggggcgtggagtccacgcctggggcgtgggaagcagctcagaaatgttatttctctgccagctcacgctggaagcgtgggagcccacactagaggcgtgggagtcacgtcagaggcctataaaaggcccagaagctcgaaaatcttggcattttcttcctttcttcttcctccttcgtccagacctccattagagcttgctccaagctttttaggaccctgtttgagagcctaaacacctccctaagacttttggtggtgagaggaaccttttgaaagttgtaatccttcgttctttctcttagaaacccctttagtgagcaaatcccttaccttgagagaaacctcagacatggctgtttggtgaagacccaaggcttgggaaggactccagagctcgaggaagctgtcctgcagccttcttggtcaccactgaggtaagaaactcgtgttctgcggttgatatgggatttgggggttttctgtgaatagtgacccatctgtgataaagctagaattagctctgggtcctgttgagagatgtgttttgaatgatgagaggatgaaggattagctttcaatttgtgttttggtgactgttggttttggctctatgtggggcatgtgtgactggaactgagtcacttgatttgagacatgccagagccttacagaggggcttgttgggcctgatgggtcgtggtaacggtgtcctgtgatgtgaaccattcaagccctgagaaaccctgaggatttgggttgtgagagctttgatgctcactgttgatggcttgtgttaagtctaggatgactctgaggccatggttgagctgagatagaccactgagggtctatggacaggcctgtgatagagaagcctgatgaaccttaggtagatgacctgggttgatagaaaggactgaggttcctttctctgaggcagttgaggactgcttaatgagcttgttatgtttatctgcttgaatggtctgtgatatatggttggttgccttgatagggcttgacacgaggtgtcagaggagaagaccattgttcaagaagctggtgttgcaggcacaactatcaggtaagctcatcgctctgggaattagtccctttctctcgttgaccacccaagtgggtgattgatgcatgccatgcttgttttgtaactgtttatgggcatgctgtggaatgaaaggcttaagtggcctatcttgatgattatatatgttaaagcctgaaaggctagatgaacggtacttggagtgatactcagaccgttccagaaatgtgaatgtatgatgaaccctaggatagacactgagatagtgtgagggtgatgatgcacctgtgattgcaggtgatggaatctataggataatggactagtatcgggctagttgaggttccctagccagaggaagagtttgaggactccctggaatagctgagattctttgggaggtgtcattgctctcctccttaagtcctaaggttggattgccctgtaaggatgttcctccttaggcagagatattgataagcctggaggattttcccaggctagtgctgtgaagtcctgagagatgagtgccccggtgtgagatgatctctctcaggcagtggattggaagtcttgagggatgagtgcctcctgcgtgagataatctctctcaggcagctgatgggaagtcctgggggattgagtgcctccgtcgtgagatgatctctcctaggcagtggaaagtcctgagggattgagtgcctcctgtgtgagatgatctctctcaggcatgtgatgtgaagccctgaggggttgagtgcctctggtgtgagatgatccctctcaggcgttggattggaaagtcctaggggatagagtgcctccgtcgtgagatgatctctcctaggcagaggaaagtcctgagggatagagtgcccccggtatgggatgatctctctcaggcacgtgttatggaaagtcctggaggtgattgcccatttatggatgttcttgcccaggtatgtgttatgaaagtcctggtgaggccaggcaagggattatgaagtcctggagggctattcccaggcatgtggttatgaaagtcctggagggctattcccaggccagtatttgtgaagtcctgagttgaggagctcctcaggcaaagtggtgaagtcctgaatgatggattcaggcaatgtttgagtgataaagaggcggtgcctctcagatatgtaaagtgtctagtgagagacactatgataggtacctctataagacgggctatgagagccaatatgagatactggtgccatggttatggctttgatctctgtgagactagtctgaaagatggcttgagagccagtatgaggtaagagacctctgatgctgatagcatccagttagtacccagagagctgggtaatgtgtgatggccaggatgatgtcctaggcccggttatgtttgtaataagtgtttgtgcttggtggtgaaccagggtaagggaagatctcccagaaccctgagcttactgagacgtttgtcccaccctgtgtggggtttgtggttttcagatacttctagaggagagaagttaccacagggcaggaggcccgagctgagtatgctggagtggtcaggggctgcagatgaagattagaagagcttttattttttatctctgtcttgtattctgtatagtatagggtgtgagcgtacacccgttgtctgtacatatttatgttgtataaccacagatgtggtagaactatgagttgtatgtctatgtacaggctatgtatatgtatgaattatgtttcctcctgattatctctgtttagacttgtatgttctctgcctatgttgttttatgtttggttaactggatcaacaggggcttgtttatgatgctttgtgttgtgttttatattccatgcataatgtaatcaagaaaaacgattctatcacttctgcactgcgttcagataacgctgatagcgcgcttatgatattattaatgataacacgtccggggtgttacatacaagctggtacgacttacccctattacgaaaataaaaaaatttttaccccaaaatttaaataacttaattttttaccccctttcgataaaaaagccagcacagggaccttggccatgatgcacatctcctttataatatcttcccatcaaagagattgtttttttatatgcataaattgtgagcttagttgctaaaaagataaaggataagattaacaacttattcctaaaagataagggataagattagcaacaacttaatcctaagaatataaggtgagtagaccaccttatatgattttgacttagtcaatcaataaaacataaaccaacacatttcgcataagtaacaagctaattataagaatggagggaataaattcactcatgttaaacttttatatgattataacatgtaaaatttttacgcaatatagtaaaaaaaatgaacatgaaagcatgcatctcccggataaatggcacaacatttggttaatatgatttcgcatgctagctagttataaagggctgcaaaacatacgaaagaactatttttgaccaaaaagaaggatagagtctggagatgtaacatgaagctactaggcatgggagacaataggaacatggcaattgcttcaaagcgtaagaacaggagaacaattttatatttggtcctgaagtggatgaaaatcatttccccttgttattcttatatgggaaaaaaatacatgaataatatatatttttaatttggttaaaataaaagtataaaaaataacttctaaaaaaaaactcaattcatgtaaaaaaaaaaaaaaactcatttttatcttctttttattctctttttatttcaaaattcaattttgactttccttttttcttttcacctggtatgtatattaaaggcatcgaaccgttaatcaaaagtggatgctaacatagtaacatgaattctctaagagtatgtaaaattaagtttaatcaacggatcaagatcattgtttttatattttttatttttttgttagatttatattggaacatgtttttaagtggaaaccaagcgtgcattaagtagtgacacgaggtccaactcaacatcttttatatcaccaataaaatctattaattattatagcttaactaataagttttattgtgctactttaatttttagtttttgtgttattttaaaataaaatattgttaacaaaataataactactaggtccccgtaccaagtttagggcacaatctaagttttcttttttgaaaaataaaataaaaaattaaccgcataaataatactttcacataatattatttttccgtacattatattttcatatagataaaaatattatattttaaaaatatgctgagtaaaatacttaactattaaatgtatagatcaacatatatacttgttttggacttaattagagatattaaattcgagttttaataaataagtaatttattaattatttaagagaagagatttatcatttataataattttatttattttaaaagaattacttcgcataaaagatatatgtaatttataaaaaggattagaatatgttttaggtatctaataaaaaaattatgttaaatttttaataagacaaaatttgattttggtatatttgattttagttcctcataaattagtaatttttgattttgattcctaataaattttgttattttgtattaatttctttaaaaaatagttgataggaactaataataaataaacaaaatttattagaaacaaaaaaaatcatcatataatatttattagagaataaaataaaatatcaagaataaaaaaaatattttattaaaaatcaataaaaaatattaaaaacccaaaataaaattcaccaatttaattatgatgcacctaaaatatattttaggctaaaacaatactcaactttttagttagaaagtattaacatggtaccgatatcaccccttaactgcttaacacatgatttacatatgtacgtaccaatactggggcggctaccctaatcgcatttcctgcatgcatgcgtcgacattaggcttgaataacacgcaatagtgaagtacatgattggattacagtaatgattaagatcgctaagatcttaccacagatatcggaaaggaaaaatgaaggtaaaagataccatgtccttttccttttaattacaaaggtaaaatcttatattgaataaaaataaacaaggttagcaatgtatacatatgtgagaaaaactcaatttaatatttttgagttaaatctgatattaagtttgatttatttatgatttattggtgaaaatctttataatattttataacgttgaatttttaacaagtgatatcagaattatgatttgatcaaatgaccgactcaaacaagtataattcaatttttggtcgaaaatctttttaatgaaagtctttttgacggtggattcatatatgaagattgatgtgagctaataacgatgcaagtatttagagcatattgatgacaatggataaactccaaaggcctaatactggtgtcaaatatatttagatcgagcatattagttgcaatggataagttataagggccactattaaatactcgtgattgaaaaaagtcttctacttaagaaggggtggaagggagtcgcccttggagcgaatttggagttcaagtgtaaagatgaagtctcacaatgtgtagagatgaataagttgaacaaaatatgagtggaaaaaacctacaaatgttaagattttatgttaaagcgtgatgtcaagttctcatgtataatgtactcatgacccatgttagtaaagatttcttttgagttttacctttagtatttccaacaagtatccaccacatgcatgattagaatcatgtgtcatacatgcaagtgacaaagttcatttttttttctcactagcactattattctagaactttggatgcatatttgtgcatagaataagcagaattctaccatggataagtagatcatatgatagacatgattaagtgaccaatgttgagtttaaaaattatgttgtatctccatctccatgtagggacgaatatacgagggggctagtagggacttcaggtccccctccctcaaaagcttcttttttttaactctttcttaaaagattaaaaaatatatgataattaaaaaaacatatcacttataataaaaaaaaatatacttataataaatttaataatatatgttatcaatgattattgttctgacctcaaatacgtagatatcgttaggtatcatgtatcgagctattgcccgcttaggtgctcaataaccattacgactttgtccttaaaaaagacaccttggtgaattgagacgagaagatgtttataaatgatccaaaaagatatgtatactaactaataaatatttgttgctactaattatgatctaacccaaagagatattatactaactaataaatatgatatgacatttctattatttttatcaattgttattatctagactagactataactatgctagtgtattattataagtgtcatttatctatctatatatttattaacattaattatttttaagattatattaaaaacatttatataattattatacataactgttataaaatttgatgatttttagttattaggatacaatatgtttttagtctctatacttttattgaatcatgtttttagtcccaaaattccatatcaaacaatttagtttctgaattttataaatagaaagcttgtttttagtttctttttacaacttgaagttaaaaaagtacaaaaattgagaagtaagtcaagagactaaaataacttttttttttatataaatttaagaaactaaattacataatataaaatatcatagactagaaacaagattcagcggaagtataagataagagactaaaaacatattttaccttatttattattatatctaatgtgtttgtttttcctttttatgatgaaattattgtttgcttgattattattgtgcttgtgacactaaagcgtcttttaaaacttgaaacaaaaatttgtatgaattatttccttcttgtatcatttgaaataaaaattaattttaattttacttgtaaaattaataaataattttataaaaatcattatttattaaagttaaacatttaaataattaaagtacaagaaaaaatttcagtccccctttgatgattttctagatttgtccctgcctccatgtccaccaagtcaaggtgagagattagaaaaggatcaagtgaagagataagagatattagatatgagggacatcaaagccaaaaatgaggcttcatttgaacaatggtcaatcacctttagctaaaaatcactaacatacacatataaaagtaatagcaaaccaacctaaaaatcagactggatattggtcatcccctagacgatggagtcattatggagaacatgcgtgactttaaaaatactttgtcatatctaaatcttttagttaatttagtcttacttattttatttatattaattttaaatcaaatttgtacagtgatatttaagacttaaattttgtttgtatttacaaatatgtcactttttcatttttaatccatgtaagttctgtttttttaagttcatgtaaattattatttttcatttttaatctccataattttatttttatttttttagtctctttgacatcattgctgatgtgatattgttgttgatgttacactagttgctaagtgtgaaaaaatgacatatttttaatagaaacaaacgatagagactaaaattttaaaaaatcaatttattagaacttaaataaataaaaaatatactcccaaaaatcaaagataagaaaaacggtaatatattgactaatttaatatttatgcccttccattattgattaactgaaaaccctctttcatgattgaagaccaaatactctcaaatataggcaagaacaatacgaaattgaaacttatatagttaagcaataagtgcttatggctagttgcggatccagaaaaataatcaagggggcactagtaacaaactcaggaaaatttatctatgtccgcatatttagtgtcgagggttcggggacaatgctcccgaatttttttttgtaaaaaaaatttaaagaaacaaacaattataaaccataatctaaaggaacaaacaaatagtcagaccaaattattgttctgaattaaatagaacaatgaaataaatttattgtagcttgcgatgagatttcaaaacaccatgataacaacatgagagttagtttagatataagtattgagtttgagatctttgaatatgagatgttacaatataaactaaaatatttctacaaaatgcatatggttaaactgtacttttcatttcaatgaagagcaaagactttaattaccttataaacaagtgttaatgcatgaattacaaatgaaaataattaataagcattgcaaaatatataacaagcacggaaaataattaacaagtgctgcaaacaagtgctaagaatatattaaaattttaatggaaaaatttaaggggggcagaattttggacaatataatcaatacatacattgtcttggaggggaagcggaatgtgaaggtgaaaacagaatgagagaagaaaagggaaattaaaaactactctcaaattttaagacctaggatattttggaaaaaataataaaaatgaagggtatatagttaattttatggacaaattcaagggggggcacttgccccccttctctactacttcggtccgcccatgcttatggccatacaatatatattgtattattttaagaaattgcatgcattcaaatcccctacccgccggctcttaatattgttaaaaaatatttcctgcaaaaaaaaaaatatttctatggaagtagtaatgtctcttttaatattatatattgtaggacggtgatgggaaatttttagagatttgatgattattgagttgaattcagtccaaaggatcaaagtttatggagatatctatcccactaaatagtcaaatgtcctaatcatggtagttaaaaaaaattggatgggttccaagatgtagaattcatattgaatcaccatttgatagggcttacaggattggatttttttattgggcaagacatcaaatatatatatatatatatatatatattatttaccgattaaccaatttctaaatgttgcattaaattccaaagagattcaacttcctcatgaatttatcttgaatcgagatctttagttcaactttattcaagttttgccgaagaaacaacttcttttttcaccttgaattggtcaaaatatgcagaattttttgactttttgtatagggttaaatccattaactagggaattcaattactatatatcaatagcgtaaaacaagggcaaatctagacttaaatataagggggccaactatgaaaaattcatatatgcatatatcaaatttcatatgaaatattcatatgttctaaaatactaattatataagtaatttgttataatattaagaggaaattaatatatttgaaaaaacaaactagacatttctaaaaacccaatattacaaaatttaggtattaacatgtcaaaaagaaatgtcatgaatttataataaaaattagtatttatattaatcacattcttatgtcagacaatataagtcagtgtcatagagttttgacacatttatagtacaactcaatatttgatttgtttctcaagatttattcaacaacttgtttggattcatacactaacaatgaccaaatataaaaagacaagaagataaaaggaagaaaaatatataaaaaagtgattagaaatacgaaatatttgttagtacatctcaatcatcaatatatgaatattttatatagtatttgtaattaaggttatcgtattgccattaataaataacttttaattatcaaataatttataaccaaattcatataaagagagtgtgtgacaccttaagaaaacctatgtcatttttattctttttattcctttatacatacaggtgatacgaaaatataaatcatttggtaaaaacaaatgtgttttgaatataaatcatacactttttgaataaatagaaagagaagtggtatcaacttaaatcattgaaatatatataataatgatgcttaattacaataagtactgagtttgaaatcgttagatacatcagagagtggatatgtcccaaaatacacgtaataaaaagttgatgcctgcacgtacaaaaaatatttggaacctagatctacccatacatatgcaaaaagaaaggaaaaacctagtcctagagcaatcaccattaacctaaacttaaggaagaaactaaacacaaaaagaggtgagacaagaggtcagcagttagaagagccctaacattgggacttctatgaggaaacctctcacatatcctcatcaagatcctcatcattgctttcctcgatgagccatcatgttcctccctggggaagctccataccaactgtcattgttaccgttgcgctatcctccaaagcatgatcaaaagtatcctttcgccgcttcctcatctcccaagatgggtactggagagaagtgcagttatggtatgctccaagacccttccatcataaggaggctctggcacatactgaggcaaagcgttcccgacatacggtggcccgagtacgtactctagcacctctaacaaacccgaagatgggctgacatcagggacattaatgagagtccaaggaccctttgaaggtgtgtcagacgagggtggtgacgaagatgaggccagagaagacgagatctctataacctccacaagtgctaccatttgaccctaaaatgaaaatgtaaggggtgagtcttttcacttcgttagccaaaacacttaaaggcctaaacataagtcaaaacaaacaagactaacaaccattgcacaaccaagcctaaacataagccaaaagctggctcagttagcatccgggtcaatataacccggcccgcataactcacaacccaactgggttgaacccgggtgagccgagttggctcacgggttgagggaaaaaaattgagagttgagatagctactgagttagcacttagtaggccagcagtagtagcccaacagcagcattccacgggaaaaaaaaataattggctcaagccaggcctcaggctcacaaacacaaagtgagtaagtgacaaaactgaaaactcacaaaattgggcaaagcaaaccctaaattcgtgtggctgctctgctcctgtcctgcttggttgcgcctcccgagctccctccagcctccataactccatttgtgttcctagtcctacttggctacttcgtcttcctccattctcggctgctcctcccgatccctccagttgggtccgccgctagcccgctactccattcgtcgctgctggtttgttatctattttagaaacacttgtttagttttggtagtggcttaatggtatgtttgattgagaagtcgtactatctaatttctcactttcttgttttttttcactttttctcctccttttttcggtctattgttatgtgccttgagtgtgagtaaaagcctaagggcattcattcagcctgggtagtaaatgaagttgatcttgatatatgctccagttgtcttaatctatgtattccagtcatcttgatgttagttaattcagtatctaacacaatgaattcccttcattcatcacaagtcttagacatgtagcttacatatttgcaaaaatgtgtcaatgtgatcaatcacatctggtgttaacttaagttttgttgtgtgctttgtttatttcagcaaagtagtggagcattttttcagcttgtcattataatgtgaggaatataattggtgtattgtgcttttatttgttaattttttagagaattttgtggggttcaaaatgatctagcttttgtgattggttgcatatttgtactagtgatggtaaatatgaaatgatgcagaatctgattttcttttgaaatatttgcatatttgattttcttttgacagaatggaatctgatactgtgcatcaaagtgttgtttgaatagattatgttagttattgtaatttgaatgaacttggggataaaagttcaaagagaaatgtaaatccaaatgtagatgaaattaaaactaaagaggctgagtgtgaaactacaagttaaaaggccaaatcttgcacttctgatgtttggagacatttcactaaaattgggataaaagatggaaaagaaaaggctaaatgcaatgggtgtgggcaaaagtatgtgattggtggtacaaagataggtacttcaaccttattgcgtcatataaaaaaatgtaaacttatccccaaatatcatgatatggctgccatgattattgatcatgcgggtaagttgaggtctagggaaattgaccatagacgtgtgcgtgaagtaatttcaatggctattattgaacatggtcttcctttcaactttgttgaatacaagtggattagggagttgcattcattgttaaatccagaagtcaagcattatagtagaaacactgctgtgtctgatatttggaaatttcatcttgaacaaaaggagaaattgaaattgttaatgcatagaagccataatcgaatttgtttgacatctgattgttggactgcatgtactgttgagggatacatttgtttaactgctcattttgttgataaccaatggaatttgaatagcaaaattcttgctttttgtaaaatggaacctccacataccgggtttgatttggctgaaaaggtgtttaattgcttgaaagattggggaatagataaaaaaaaattttcaattactttggataatgctagtgccaatgacaatatgcaagatgtattgattcaacgattatccttgcaaaatagtttgttatgcgacagtgaattttttcatgtgagatgcagtgctcatatattgaatcttatagttcaaaagggtttaaagattgctagtggtgctttgcacaagattagagagagtatcaaatatgtaaaagcatcagagggaagaaagatagtgtttaaggaatgtgttgatgaagttgggggtattgataccaaggtgaatttgagattggatgttcccactagatggaactctacatttgttatgcttgaaagtggactgaagtaacgtcgtgctttttctaccttctccttacgtgatagaaattataaatcatgtccatcaaatgatgagtggataaggggagagaagatgtgtgaattttttaggccattttacttgatgactaatttgatttccgatacatcttatcctacttctaacttgtactttatgcaagtgtggaaaattgaaagtttgttgagggagaatgccaaaagtgatgatccagtgattagtgaaatggcgcagaggatgtttgggaagtttagcaagtattgggatgattatagtgtcattcttgcaattgcggctattcttgatccaagaatgaaatttaatgcattgaagttttttttataacaaacttgattcttccacttctgcaaacaagcttgaacacatcaagaataagatatacaagctttatgaagaatatgtgaaacaagatgccggtgaaggaagtgcatcaagctctcaaacgaatttgttgacacaatcttccaaccggaggaggatgaccatgacatggatgcatttcatgtaagtgttattttacttattagttattaattataatttcattgaattgttttacttaaattgatgtttattttcattgaattgttttgaattgcataggagtatataaattatgtgagccaaaatgtcttggttaatggtaagtctgaattggatatatatgtggatgatggacacctagaaccaagtttaaataagaagcttgatgtgttgaagtggtggaaagatcgacaacatcattttccaatcctttcaagaatggcttgtgatttgctaagcattcctataactacagttgctagtgagtctgcatttagcattggtgctcgcgtgcttaacaaataccggtgttcccttcttcccgataatgttcaagcacttattttgactcgtaattggataaatggtttttctcctatggctgaaggtaatattttataatctatctttacattagtcataatttattgtttactaataaacatttattttaattttcatctttctttttgaattgtagatgaagataatggagaaaatgaagatgatgaagatcaaattgatttgtcaaaacatgattcgaatactcttcggtcttcgtaaacaagttaatattgatgattgagaatttgagatagatttatgttttactattttaatgttgttgaacatatttatgtcattttgtttgagtttcatgcacacttagtttgaatttggtgcagacgtgcagtttgtaatatttaaacttgcttagattgatctaatttgcattttcctgtacttattttgtggttttattatttttttgattttttttaatttaaagtgagccagcccacgagccaacccgcataacccaccaaccctggtgggttgagccgggttggtaaaaaattgacccaccaagaaagtgagccaacccggcccggctcacttttaagccaacccgtggtgagccaacccgggtgggcggggctggcctgttttgacagtgctagcgctgatggctccaaaatccagtgtatctggtgcccttggcgccactttggcactgatggccccaaaaatcgcgaaaaatagccttctgctacagtgccacgctcggagcgccaagctacagtaactgctacagtaaccttttttttttagccatggttattatagaatgattgtcatgagtactctttatgccatggtatgatgacaagctttcaccggccaattatgcctcgcatttgtcaggattgccaagttggtattgtgaaaaacgcgaccataaaatcagcgccatatcctaaggaacaaaaactaagtgagcacacacaccttaggtatcactttgtaaggtcatcctaactccgaggacttactcttcaacacactactcactaagtgtttaatttattgtcgtcgtggggttcggttatacaagtacagaacgtcgacacctcatggtacaaaacctccaattgactgtcgtctagcgagatctcacaacttttagcacaacccgcatacgactctcttgaagaatatcttagcattcgatcgcaggtttgtgtccgcttgcatgtctctcaagcacattactctctctcaaagaaaacatcctgaccacatggatactcgtgcccgaatccttatgaacttatcacaaaacattgcacatcattcgagacatataatgtccattagaacaagggtctagccaacaccgagactagtgcctaagtccctatatccaccacacaaatgtgcaatcctttgagacatattatgcctgctagaacatggtcttagtcgacaccaagactcgtgcccgaatccttgtaattaccacacatagggtctaacacacaaattcattataatccttggacaacaaatggttgaggtcacacctcctcgatctccaagtaaaacaacacattccacaattataattgtttgagattcacactctccgagtatttcaatcataagaaaacaaattgtcacaattaaaatccacatgtgttgcttatacaaaattaacaattcaaccataacaacacttagtcaaatttaacaaattagcataacaaagtaatcatgcattaaaaaccttgactttataaatcagggcaggttcaagcctttgtagaatttaacaaacaaatttatcaacataaaacttcttatataaaacaccagcattctcaatgctactattgacatcaacccaatttgatgaaaatgattaaattgatgcatttaaaaaaatgtgaggatcaaattaaatcttttaaaaatcaaattaaatattttaaaataatttaaggattaaattgataattgaccataattgaaatgataagaaaaagtaagtaagaaatattcaatacaagattatcttgatatcaaatgttgtcaaattctagtaaaatatatataaaatttgattcatgaatatcattagcaactttcattttacctttagattcaccatttttttttcaacatcagttgttttaacagtaaagattaattatacgtctactgctttattcataatatttcttcatctgactattggattgagcaaaatactcttatatatttttagaaaacatttgttgcagtggctcatttaatacagagattcgtgataatatatttattgattgacatacattttgaataacagtaatcaatacagattactttaataataatattaatatatttatgtagaacttctttgctttaataataaaaaaataagagataataaaaacatctttactgtaatattttgagttggaattttgaactcaagatctagtctttactaaatctttcaatgaaggaagtgaacagatcttgaacataacatagagaatgagttattgtaaaaaaccttaaaatatatacaatattaaaaaaataataatttttccttatcttcctccttaagatctccaaaaataagatttattattaaagaaaaaaatagaaaagattttaagagatctttaattttatatatggtacgagatctatcaaaaaatagaataagattccaattttaaatctaagattaaagacaccatatttcaccttaaacaaaatagaaccaaatttgaatttataattttaaacaaactattttagttgataacaataaaaactcacgttttatcattttcctataaaaaattttccttttatcatttgcctataaaaaaattctacttttattaacaataaaacttcttaccgtgtacgattaatgattaagagcagaatgcttcagaaattgaattttgaaagtttgcaaactataatcatgcttagttaagcctcgtgaatccattaatataagaaatatcttatattagaatcttaactgttatgattcatattttacagagaaaaaaatatatattttagcatataaaaaatatgcatcttttattttgatagaataaaaaaaaatatgcatctactcctttagtaatcataattctaagacagtctcatagttatatgaatttaactaatggaaattttcaatttttaattaagaaaattgaaacacaaattttgagaaatcttaaagatgtgtttgcattactgtccagacaacgctggaggcacttaaatcatagctgaaagaaattgtgttattgacctccaaccagatttttttaatagaaatacaaactcacagtttttaacttctacacaacacttgaattgcaagttaacaaatatctacaatttttttatggaaacttattaacttatgtattacttaacgacaaaggcagagggttcgtttatttttaagttgaaaagactaattttaaaagaattaattttaaaccactattaaatacagtataattaagataaatgcttaaattaatttttaaaagtgaataaataagactataattaatcagttgaacatgattactgtagtttaatcctctaattattttgctgatcccaaaacaagaaacccccctcaatcacacgattcgcatccccatgattattatagctttgtttgctatatttattattgttccaacaattgaaaagaaacacgtgtccatcaattaagcaaaaccaacatgaactttactcttaactacggattacttaattattaatctgggtcctcactaagtttacgtttgttaattttaaccacaaatagtgattagaatttatctttttcttaaggcaaaggttaataaatatctttggattattgattaaggaactaatttttttattaaaatatgtaagattatactgtctatttatgatttattttactctcttattattttcataataaatattttttattttagttaattaattaatattgtaaaatactgattaattatgtcttttattaattgtttatttattttccttcactaatccctactaataatttaatattaaaagaaaagggaaaggcatgaaaacctcgtaacgcgagaggtgaggcaaaaggggtttttaggtttggcggatgagtgctgagaagggtaaactcagcctttctttctttcatcgcactgttcctttcttctcacgtgcgtcatctccatcactatcgctatcattcatctcatcacccctttttctatatttaaaatcttttattctactacgggaaagttttatgaaagagaaatgataattttttttatgcttttgtaaattaataaaaaataatttatcttttttattaaatttaaaaaaatatttatctgtaataattacaagtatttgatttttaacataattataattatttgattaatattataaatgaaattaacattttaattcatgtaaggaaaattaattagcatgatatgtataatttattaaacgaaaaatttacttaattaaatcaaacaatcaagttcgtgtcaacaataatcttagattatttggttaaataaaatgtatgaattaatattaatttttatacttattttttatttttacatattaaaaaaaattattcaagcaagatagttcaaattttagtatttttaattttattttgactcaccaataaaaaaaagaaaacaattttttttaatttgataccacaaaataattttaacatataattaatataaagttgttgtgaagattcaatgtgtatagtctagttgacattatatgctgaattcatgaaagataagttgtatttgctccatgtagaatactttctttgtttttatttataagatataatcaacacattttttttttcttattgtaaaacttcacttgatctctttagtgtattaatcatttttcttactaaaaatacttaaaattgtctctttttctctctcttattgagattgaagaagataaatagttttcaaataaattaaggataaattttaaaaatattataaatttaatactaataattaaattaaataactttattagtaaacgtaaattagacaattatgtcttataattaaagaaagaggtaatacattattgaggatgaattataaattttaagtgtgactatgtcctagatcaaggattagtcctttaattggcttaaatgattgaagcttataggaatatctcggggtctcaccggagagccaaatgtccttatggtaactaaaaaaattatcacaaagataatatcatatatgacttaaaatatgattttgattcgtaataaatattcaatttttgtatttattttttgataaatttttgttttatattgagtctctaataaaataataattttattttttttcttgatattttattttaatctttgataaattaaagaatttttttactccctaataagttaatgaattttattttaattctgattaataacatgaaaaattattacaaaataaatttaaattcgttaatttaacaaaaattaaaagaagtgctaagaaaaaacaaaattattattttattaaaaatttaacataaattaaaaatttattagataataaacataagaattaaatatttattaagaataaaaaatttaaacctaccaaatagttcacccaaaaaaataacattattatataacatcaaatcagtaaactacatacagatattaaataaactaagtactatatgattggacgaattttgggtgataagaataatttaattaattaaaaataactttaaaataaaaaacagttattaaattattttgatacaacattatgataaaatttagtacacaaaatttaatgtcaaaataatcaagatatattttataatcatttaaacaccagtaaaccgaaaaaaaaatctgataaagcaagagggttgggaaaacgacaaaacccagaaacccagtgtcagaaatacctgcaacccagcgagaaagaaaagaccagaccagacacacacacattacatatttacatacattatacaacattattacataccactgctactactactacttcttcagttgttaccggaatagcaggtgaccatctggtttctggaaaccctatagctcttcgtccttggtgatgaggatgcactttgtttgttccttgttttgaagggagaagaaagaaaggaagaatctgtgttcactgtagcgagagagaaacaaagaaataaccaaagaagggaatttgagtgtgcctgctgtcaaaaaccacaacacacacacaaaaacgcacacaaaacccatacctcaattttctcattaaaaatcccactttctctctcacgtatctaactgatcaacatggaaacaacatagatagatagaaaaaaagaaagaaaaaaaagaaaccaaactaaaccactttctctctctatcatgcttcacaataacatcaccataattacacacaccctttggttccatccactcttttcatcgtcacttcactcttctctctctaacttgtgttgaagagaacttcattttctgcttctgtgttttgtgtatttttgtttgtgtttgctatggctgagggttttgaggcttaccatgtgccacaacaaagcagaagagataagcttagagttgtggcgacacagaaccaacaacatggtctcgttgagccctcctcgactttgcttcctttgtacgacccttcttcgtttatatcttctgacttgttgttgacgagcttccacaacggccaaaaacacaacttgggtagttgtggagtgaaggaagaacaacgtgcgaatttgatgatgggttttgcatcaacagcaggaggagttgttatgaacaatggctcttcttcttcgtgttgttcttctaactcctcttctgtttcttacttggatcctgaatcgtctttgcatttgaaccaagccacaattcaggttattaacaacaacaacagcagcaacatgtttctctaccaagcacagaacctgagagagtttgatcagggttataataatactaataacaacaacaataatagtgaggtcatggtgtttaagcctgagcctttgtctttgtctctgtcatcacacaacaacggtgtgaatcttcagcgatatggatctgtggtttatggtgataaggttggtagtggtggtgtgatttttggtggttctggtttgaatgaggtttcgaggtgcacagtgccaatggggccatttactggctatgcttcaatattgaaggaatcgaggttcttgaagcctgcacagcaattattggaagagttatgtgatgttgggggggtttgtgctgagaagattgtggctgatgcatcgttgatggagcctattcctcctccacagagttcaagtgaagatccactaggggatcatgggggtgatcaaggtcgcaaaaagtcaaggctcttaactatgcttgatgaggtttgtgtttatgtttatgttttaatatcagtttctttttttcttctcttcttggtttgtgttatttttgtcacatgaaaattttggttaaaggtttttttttttatttgttcatgtttgatgcttgatgttcctgttgatttgaatgttagtcattttgtccagttttgttactgtttttagtttggtttatccagaagataaatggcttttgagtaaattaaatatgccagttttttgttttttttttataatatttttaaggttttcaaaaagtttgctcgtgatgtctatctgtcattaatgcatggttagtgattccttcaaagtggaaggttgcttagattctgattgattgtgttgagtaagcatgtagtgtatgatgtttttttttttttttttttttttatgtcatgttgtcattgtaatttatagctttcattgatggtcatttaactgtacattctatgtgcatcatcaagattcttgtatttcctgtgatggatggcctcggtgaactcaattgttcttttgaaaaagttaatggtggggaatatatgcacggagatgagcattgtatttgtgaagtgtctgtcaactatataaagatttctaatatgtgaccatgtcatccagtttgggagggataatttgcataaagttgttaaaggaatccatcagaaaagatttatactccgaaaaagtgtgtgttgatatgatcatggggttcaaaggttaaagaaacttacatgacaaggtgttttaacttcatgtacggttggcttaatttttttattattttaattgacatattactgaagatctggatgctaaaatagtatttttgctgggaattattgttaataaattgtttttgcaagaaagttgtctcatatgatatggtgcatatttggcgggtgtattaattctgtattgggatattagacttttttatatgttacttttttctgattggacaatgttaatgataaactgtagcatgtatggaatgataaatgtgtctgtcattctgtgatgtttattcactatggaaacatgcaatatgtttttatcattttaataatgtttattaattttatatggaaaactgtctttcttctcatgccgatgaaactaaagtatatgataaattttaatcttagaccacaaaggtatctcttaacaaactatcaaagcaccttcaggcatataagtattatgagccttaataaaaatgtaaggctatgtttgaaatatgttcgttaactatggccttgtaaaaattttagctttaatgttatcttatgcattgttgtttctcaaattgatcttggttgggtaataaaacggctttaagaaaaaacattgattactgcctttggtttttctctggttgaacctatcactgaaagccattaatcagagttcaattgtttttgaagaaatatgtggtacagaaaaatgtttattctgccacatcaagcaaaatgtgtatttcaccttattttattttatttttttattgtgaaatttcaccttattttctaccacctcattttttacgtgttcctgcttcggtttggttccttcctggatcacataaaggtgtaggaattttgatcaattcttgtgccagaattgaaatggtgtaaaagtcatttaggttgaagtgatgtgtgaaaatcaagaccgtgaacataaattttagtatgtaatagtgaagtagtaaagttcaatatttctttttctttgaaatcattagattgcatatatgatctcattttgtagtggatgaaatttgttaagaatgaagtcaagttgtgctgtaccaagtcttatttttattttctcatttttgttgttttcccaaacatttaaaaaatattcccttttttctgtaatgttatcactcatttggatgattcggtctggtagatagagacatgcagctcttcggatttgtattgcacatagcttcctccctattatttctccaatggtaaggatattaagataacaacaaatgtctattcttttacagttctctagaaattcagaatatgtggtcaacctttaggcaatcccaagtaatttgtgcagcattagccgcaatattaaactcttaaatggggatttttagaatatatgtcaaccggcaaagttgatataaattttatggagtcatgattgccaacagataggacttcttgctatcaattgttgcatgaaattccaagtcatcctccctgtgtctgggtcttttagattcgaagttatcggatgcaaaggctaggaaattgacaagtttgtgaggtttgagtaaagttttcttatatgtactttgcatttaatttgtttgtcttgttggagtatctaggtaaatatgttatttaattagtacggggggcttctcatgtgattgccacaaaatgatgtgaatgacttagggccatgtgtatctaatagggacttggttatatggagtgcctaagtcacacgttgaatagtattcaatgtttggtggagtacttaagtgactttgttctctgcccttaatagctagttcgtaagagagggttttccatgtgtttggatatgcttatcattggaactagacctggttacccttgtttcaagaagagctacctacgaagcacacatagagtgcagctggccactgggacatcaaacgccagttaacctcacagtgcctgcaatttggcaattgcattgcaaagccaccacaatcatgactacgactgcaatttaaaaccaagttggtgttgttaaggattattaacctttctatgttcttttattgagaaattgataattcttgctgggaaattttagtctggtcttcaattagaccaggaattgattgggcaattaaatgtcatttgttggttttccaaagtctagcatctggtattttcagtaatatgcctcctgtgtcccccaaggcgaacattattcttgaaatgggcctttatgatgataattattatgcctagacaggaagagtatattagttctttttaccactaatattatttatgttggtaaacgcaatttggtacatgtaccctaaattttggagatttgcttctccaaaaatagattcatttatgaaatttcaaatatcagattatctaattggtgctagtgtaccacccaattgggatgtatggacttaaatttggttgttatgaaaaaactttcccacttgttggccatgttatttgtaatgtagctgtatcctgtttgaaaggttctaggatcaggatgcaacagtgttcaccagctgtgaggaatttctggtgccactctacatttctcaattctcaattttcatttgataaatcacgattcagttaaaaaaaaatctaaaactagttatgttacaaatattgatagttttaccataacaaacacggtaaagtacccgtagccaatatggacttcatgtttagttctttgtttaagtcttttattgttatatggtgggttaatcaagtagtctctattaaccattagttgaaatgagatctattctcagctctagcagatggtagcatgagtttattgcttaaacaggagcagcaaatttcaaagaattccttaactacaatgatgcttgaaatttgtcctcattttgagaattgttgttcatttatcttgaacaggtttacaggaggtacagacaatactatcagcagatacacgcggtagtaacctcatttgagtatgtctctggcctgagcaatgcggctccctatgcaagtttggctataaaagccatgtccaaacattttagatgcttgaagaatgccattactgatcaacttcagtttgccaataaagctcattttcacatcagcaacaggaaggatgaatctccaaggtttggcaacagtgataaaggcccttatggccaaaggcctaggtttcttgagcaccaacctgtttggcggcctcaaagaggactccctgagcgcgctgtgactgttctgagagcttggttgtttgagcactttctgcacccgtaagtgccatttaatgtttattaatatgaatcacaacgcttaagttatgctttgttggatctggctcctttgaagtaagcaactcactttcgtgggtagagtaatgttgaaatgaaaatcaatgatcgatattttgtgcacatgcataacaaatcatgaaatgtgttgaaatatcaacagttgatttcctcatcaacaattggaattactagttttacccttacttattttagagggagtcaaatccgaatttgctatatacctgacatcatgattttgagtcccctgccaaaactatgcattatgcatttatatacatttgaagtcctttcttgtgtttatggtgttttgattgcttagttacttgttttctcttcagttatcccactgataccgacaagctaatgttggcaaaacaaactggtctatctcgtagccaggtaaatattactgataaaggttccatccttcattgcgtgtttggtttaacttattctgaagaaacattaacttgtgttttgattatttctcaaaattaatctctacccgaaccatttcattcttattgattaaagtgtttgttcttctcatgtttgacaatttctatctgtgtcaggtgtctaattggttcattaatgcaagagtaaggctctggaagccaatggtggaagaaatacatatgctagaaacacggcaagctccaaagaatccgcagaaggaagagcattgcaggaacaagccaagtgatcatttgccttcggataactccattgtttctgagaatccatctacctccacagataaatttcaggaagctccttacaagcgcaccataaacgaacttcctaacataccagttacgactcaggaacagctgaatctgccctgcacaagcaatcagctagtaggagggggtgttggagtgagcatgggtggcggcagtgcaagcaaaagtgtgtcactcacactaggcctttatcagaatcatggtattggtctggctgaacctttccccttgaatgcggcgcagcgatttggtgttgctcttgataccaacaatgaaggctatgttatgagtggttttgagtcacaaaataggcatattggaagagatgtcattggaggacaacagttgcatgactttgtaggctgatgaaggtcttcaatgtctaataacgacaacttctttgcatggagttttaatttgattggggtgatataatactaaccatgtttctgttgtgctttcatgaattatccaaaagttagaagagggattggaaagttgttgcactttgggttatgctggcaatgatgaatgaaccttttccagttatgggggattttaactggtcttttttattgaggtcacttgtatgaaggttgtaaaggggtgggattgatactgtcatagaagatgtgatgatccaattcacctttgtgttgttgttgaccttaattgcttggagtaaatccaaatgttttggctatttaagctgcttgtaagtttgtttttttttttttttacttttatatatattattattgtcatccaaaccaggtaaatggatttcaatttgtaatacttgaaatcttgtccaacatgattgtacaggtcatcatcatcttagtaatatcttcgtgtctttatgctgcaaatatagttcctacatataaggaacttgcaagttctcatgtccactaattgaaaaaccctttgcctacaattaattaatctctatcaattacgtaaagtcttgttcgttaatctccctatgctgattacatttttggattatgtgatgtgggtcattgcatgtagaactctaaaatgtgtctagtttaatgggtagggtcatttaactagttaaaaatagagtgctactaaatacactatatgcatttcttatacaccatatataattttaaaaatgccaaaactgcccctgactccatttttaatgttactgcctctcttgaaaccgttgtttgctgttgctgctcacttgggttgtgatttggtctattttttgcgatttggttgtgcattggaggtgttggtgttggaggaggtagttgtgggtggtggtaggtcggctagccggtgggagtcgtcggagagcgcatttttcgcagtggagagaggtaagtgagtttctgttttcgtacgaataacataatccgtatgttaaatgtacgaatcatgttgaatacggattaggcaatccgcgggtaacgtacggatcaaccaatccatatacaccttaaggattagataatccgtacagtgtatacggattggttgatccgtacgtttcccgcggattgcctaatccgtatgtttagtttcagtgtgtccgtgagctatgtacatacggattactcaatccgtagtaaacgtacggatcaactaatccgtatatacattacggattacgtaatccatactgtgtatacggattagttgatccgtacgtttactgcggattgagtaatccgtattgaatgagaaaaaaaatgaaattgaatgtttttttaaaaattttaaatgaaatattttacttgttttaatgtttatgaatgcgtatgttactgaatattattatgggtatgtaatgaatgtgaaatatattttttttgtgaagatggagaatgatgactggatatatgacgctattatgtcaggcgaaagaatgtagaggaagatattggagaagaaggtgatgattttgaaaattccaattgctcagttgattgttcgacagccttcaatacgtcagaggtatatatttataggtaaacttgtgtaatcaataagtttaactatacaaatgttaataacagttgaatgatataattgtgtaggtgtttaattcccgtgatgatgtattgagatgggctcgtagtgtagcatatgataatgaatttgttgttgtcataatgaggagtggtatgacaaatgggaagctaggaacaacatcatatgttataattggttgtcaaaggagtggaaaatatagatcattcaaaaaaggggttgtaccaacaacggggagcagtagaaaatgtgattgtccgtttaagttgagagcaaaacccgtcccaggaggtggaggttggatagtcaagctaatttgtggcactcataatcatagtttggcaaggtcattgtgtggacatgcatatgctggtaggctaactgaggatgagaagataattgttgctgatatgacaaggtcaatggtgaaacccaaaaatattcttttaactttgaaggagcacaatgataataatcatacaactttgaagcaaatctacaatgcaagatatgcatatcgcacgcaaataagaggtgataacactgaaatgcaacggttaatgaaacttcttcagcgtgacatgtatattcattggcatagaataaaagaagaaaatgtgatacgtgacttattttgggctcatccagatgctgtgaaattgagcaatgcatatacatcacatacaatggtatcttatttcccctaataaccaatccatatacactcattcacaaccgtgcagacatcacatacaatggtaccttatttcacctaataaccaatccatatacgcaaatctacaagcaactatacctcacatacaatggtaccttatttcacctaataaccaatccatatacactcattcacaagcaactatacatcacatacaatggtacctcatttcacctaataaccaatccacatacgctcattcatatttcaacatcctaatatacataaaccaatcacattttaccaaatttgaaacacaaattaagcttctgaggtcgatacggattgtctgatccgtatgaaccttacggattacacaatccgtaaggttcatacggatcatacaatccgtacgttgttcacggattcagtaatcctgcatgcctatacgaattgtctaatccgtatggaccttacggattacacaatccgtaacattcatacggatcatacaatccatataggcatgcaggattactgaatccgtgaacaacgtacgaattgtatgatccgtatgaaccttacggattgtgtaatccgtaaggtccatacggatcagacaatccgtatcggccttattgtcttcttccggattactaaattcgtaccatttgcgcggattgatcaatccgtaaagcgcaaaatcacttacctcttcacctcgccgacgaacgccgtaaaccaccaccagcaacaatgcgaccaccagaaacaaaaccttgctcgactgcctttcttctacaccgccggagacccaccgaaagcctagcacaaccgaagaacgcaccaacaagctccgacagcagcgagaggaagaaacaagaatcgacacagtgctttggctcctcaacttttttaatttaatttaaattatgtcaagggcaattgtggaaacttactgtgcatatatagtgtatcagaaatacatatagtgtatttagtagcactctgttttggggtatgtgagtcggttcatattgttccacttagtcaagtgtactcttatgtggtcaactttcaagcttaattttcaattattaagattcatgctgagttcatccttagattaagaaatatttgtctactattttattataaattagaatatatatatatatatatatatatatatatatatatatatataactcagaaaagtaaatgtgctaattcacttactaaattagatattttcaatattttttcttttggcttttcaatgagtattttacacattgttttacaagggaaaaaaatactcaatcattttgtttgggttggaatgatgtggtgcaaaatatttactaatttgtcaataattaattttctgttggaaaagctaattaataatgtttagcagaacctctcattctaattttattttatcatccaaaaacttttcatttcaagctacttttttttatcttagttttttatgtcttttaattcaccttttatttctaaccttatattgaatttcaattatttttttaaaagaaatggacaattgttaaaaataatcttatattttcaatttaaattgttcatcgtagataaaaatattatatatatatattatgaattttattataatatatttcatatattaaaatattattcattataaattttaattatataaaaatctttattctatatagcacaatgcataacttaaaatattagttatatctaataatgatagacatgcatagttggcacgtcaaattggtggtgacatgtccattatgttgctaatcaaacctaggcatgtctttgtcatcaaaactcatgtctacctacactttatttcacttctttttaaaaataatgatgaggaataaaaaattaattctcaatattaaaattcgaaatgataaattataatatatatatatatatatatatattataaattataagatatattatatattatactcgaatctgaaagttgaatatttgaccaaatacttaaaaatatataattttatgtcacacacaccatattatgttaatgctctatttccctagtgacaatcctttgctccactgacaatagctggctactgacagcaccgaaattagaatatcatcgtaaccaccattgtggaaggggcacaccactaaggagaaaaagaaaggcaactaatggttattttgcaatgaccttacgaaccacagctgatgttgaactttttaaacacaagacatgacccactcataatctttcatgaaatctgaacaacttttaaggtagtgaactgcacaacaccaaatggaaaaaaggagtcagtgttcccaaatcaaaatggggcactatgaaaagggtaatttaatctaagattgttagtatataaaccttgtgcaaatgttccaaactttctaatcattaattaatatcctaaagtacaactttttctatcaaataaagaaaaacaaagaagtaaattgaatcgcaaaataacttaattaaaaaactttgttaatggtttatgcaaataactttgaagaaatttaaattttcatttagaagttcatagaatttccattgtgtatgctattaaactagagaaaatgtttaatgtaatcattgtttacatgtccaaagtagtttatgctatcatcctaattccagcttcttcatatcgtagctttaaaaatctccttggtgggaaggatatttttgagtcctaaagggttcataagcataagttcttgtaaagaactgcaaaagagaagcaattagcaataaactagtattctaaattacctatctgagcattgaggatttcaagcacacttcatatcatatcacatactaaaaataatataaccactagcaattagttatccgtcatttactataagtaacaagcaaagggagaggaaacggaagaaaagccatttaactaagttaattaagatggttgttgctaatataggatgatgttgttattcatatatagttattttattgggaaataaaatggggtgacctaaggacaattaattattctatttatgatttaaacatgaaaataagggggcaattaatcaagtgggtgtagcaccttctaaaaaaaaaaaagagtaggagtagcagctatataagaaaaatacaaataccaaaaataggtggggcacaaaagcagtatgcggtagcattttgagagatgcaactggcatgtttcttctgggctttgctgccaagatggggaatcgctatatttggcagctgaatttttccatggtttggaattggcttggaatatagacttttgcaatatattgtggttggtatactttgagtctcaagtagctgtaaaacttttgaataacggctattataatttggttaaaactgtttggaagactttagtaaaattaatttagaatgaaattgattttggttaaatttgattttgaagtaatatagtttatgtttaaatgttttattataaaattaagttaaggagtaaaattcactgtaaaattttgaatccaatacaaaagttattcaaagttgtttcaacttagaatcaattttaaattcttctccaacgtgaaaccaaacatgtaaaaatatatttaaaatcaattctaaacttataatcaattttcctaacatccacacaaagtcattcataatatcattaggaaacatgatattcattggtaaagggcccaaattctccgaatccatgtcttgttagtttttacatatggaatggatcttcatttttcattatgggtttttgatgttacacctatttttattttcaatgcagtaagagttaagcttgtttgtatatataagttttcctagctagaaattcaaggcattttaataaagttttcatcgttaaataaaaaagataaaagtcaggtgattgtgcgaagatggtagggcttatgttggaaaatctttacatgcctttgacatgtattgtttgtatggttattgttcgagcataatagtagcatgtggaaactttcacttttccaatatccttcggaaggagaaacacacctttaatatcttgtgtagttgatccaactatgaagcaaccttctttcgctgatgatcttctcttttttataaaggctaattctgagcaaatggggataatactgaggtctttgcaaactttctctgatgctttgggtgagaaggtttttgtccctaaaactaagctattggtgtttaggaatgttagtcaccaggtggcttctcatcttggggtgatctcaggtttctctttgacttctaacatggggaaatactgaagggtgcccttgttgcgcaaaaggaagaagattgatcactacatttttctgttagataaaacgcataatgagacttagttattggcgcgctaatagtttatcctttttgggttgtgttaccttggctaaggcgatgatatctgttagatacagggagagttggaagtaggagttgcaagtttatcaaagcaaggctaaagtatttggcttgaagttttagccttttacatacccaattattttgatggcatttgtaatttgtctaagtggttcaagtacattacctagtgattcttgcattgtatttacataattcatttacatgcattcatatgtagtatataggattaaatgcttgcatttgcaaagaaaatcacatggcttatgattttggaaaaataagattttgcactgtgttatgactaacagtcttatgtaatcgattacatatgtgtgttaatttctggaaaagccatgatgaacactttaatcgattaccactcttttgtaatagattaccaagtgttatttcaaaatatatctaactgctttaatcgattacaagcaaatcataatcgattactaagtgcattttacatataatgagtgcctgctttaatcgattataagtaaggcgtaatcgattacaaaggcttgtttctacctgagcttatctgatttaatcgattaccattatcatgtaatcgattactacagtttgttttcgtaaatcagttgtatgtgttaatcgattacattacgtattaatcgattaagttgttcatgaaagtttttcagaaaagctcaagaacatattaatcgattatctgattgaattaatcgattacatatgttaaaataattgattaccttagcagattaatcgattaatgtctgttaaattagttttctatttaaaggctttatgggtttgcacttagagatatcagaacattttgagaacgaaatatgctttgagattgagtcttaccaaaagttctaagtgcattcaaaagatcaagaaactgattttacttagagagacacatcttgtgagaagatcaaagagttattgactttggaaatgatgtgcttgtgagaaaaagagatttcaagaaagattagtctgtgcattgacattcatacaacctgattgattggtaacttcaaacattcattcaatcatctattaaggatctcaggttgtgtatttcttgaactctttcttttagaatttctgttttagaattctgtggtgtaaatcattttggttctttcaagctttcttgagtagggttctcaaggggtaaagatttgagaaggattctcgggatctttgtgatttgtattctaatagtgttttacaattcagtatctttatttagggttgataaagataatcacttgtaatgcttgtaaaagaataatttgatgtagtgaaaacactaacctagtgttggttggaagacactagacgtagcctccaagtttgtgaggtgaaccagtataaattgttgtgtcttgtgttctttatctgtgtttctttcattgcttgtatttggaaatcaatatataatcaacaagaagcatctcagacattacatgcattctaaggtgaatctagattgaaagaaaattctgattttgataaagggttattgagtgatacgatccaagttttaattccgcaaattgttttaaagaaaagttttaaaagactgttttaaccaattcacccccctcttggttatttgaagtgtgttcattgtattttcaatatctgcccttccaacttacaccatgtagtttgtcctcttttctttgaatgtgtgtttggagcacatgaatagagattttgtttggggtgcatcccaagagcagaggaagcttcattctatctcgtggaagcattttgttaagtccaaaaaggagggtggaatgggctttaaagatatatgtcgttttaataaatctatggttataaagattagatagggccttattgaaaagctcaacgtgctctgggtcagggtccttaggaaaaagtatgattgcgaaaatgacctgatccctagataatcataaagtcttctagctctgaggtttggaaggctattcatactacctaggttatgttatccaaggaggaaggtgggttttgcgtaatggggaatacactttgttttgggtatgatatttggctgaaataagggaaacctttgaaatattgtgttttgaaggagttaccctactagtggttggtgcataatggttcagagtatgccgatttggggggaaactagaaggtccatatgtttattcctttcatctgcttatgacctcctaacttttccaaattttcatagcgatcatcattatggaatcttctttggaaagattttgggaaagttgagatctagggatttaatttggaagattttgagagcgggtttgcctacgaataattatcatcttctttgtggtatggtagatagtaatgttcgtccgttatgtgggcttgagcttaagactaagcctcaccttttaagggattgctcaaaagtcaaactgatttgggaagcttcaaaagggaaccacttcagtcaaatattctttgatgtagatttggttagatggattgagcttaatcttcaagcaggcgacatgactatgaaaaatattgattggaagactcctttcactaagattgtctacctaattagagagataggaaagagattgtgtttttaggaacgacatggaattatattaatgttttgaatgcaactaaaggggtttgtctgcaagcccatgaagtggtttataatcatgttgacacccttcaggttaagtgccataaggagattaatgtggtctagcgaccacccccgagggttgggttaagtggaatattgatggttttgtggcacttcatggttctaatgcttcttgtggtgggatgttgaggaattgggctagtgcttggttattaggtttcttgtgtaatctaggttctgcaaatgttctttcctttgagctttgagttatttttttctgctttggagatgtcttggaaccttggtcatttgcgtgtccttttggattgtgactcaaaggttgtagtggagcttatttctaaggggtgcttgtccttccatccttatagctcattggtgcgtttgattcaacaattctttaatagagattagattgtgagtaggggtgggcatggattggatttttaagaattcaatccatatccaatccatatctatttaaatggattgaattttaaatctatatccattttttttaaaaaaacaatttagattcaagatccaatccatttaaatggatatggatttggttatattcaatttatatccacttaaatgttataaggatttttttttatacaaattttagttattatatattaaaaagtgaaaacttagtatctgtctatttaagagctattttcaaccgactttggtcaagactattttcgatcgatcttggtcagtgtatttttggcctacctcaaccagggcaatttcgatagatatcgatccagacatttttagaccgacattaaccataactatttttggctgacattagtcagtgcattttcggtctacattggtcaagaatatttttggtcgattttagtagggatactttctggttgaggtcggctagggtttttagtcaatgttggtcggtgatattttttggccgacattgactagggatttttcaatcaacattgatcgtgactagtttttggtcgacgttagctaggtttttatgctgacgctgattgaaactatatttttgttggcaactactaggatttgttggccaacattaatcatgactatttattttggctagcgttagctagggatatttttgttgacatcaactaggttttttttcgatcggcgtcaattgggagaatattttggccaacgccaactagtgttttttggccgatgttggtcgatgatgtttttcatccgatgttggtcaatgattttttcaaacgatgttggccaaaaaatagtcttgtttgacgtcgacaaaaaaaaccctagccggtgtcgagcgaaaaacctacttgacatctgaaaataataggaatactcacaataaccaagaggggcgaattggttaaaaccttggtattttaaaattaattcaaatcagagtttaggatctttatcactttcaaaaccaagaaatctttttactcaatcaaatagctctgccacaagatatcaatagctcaaagtagaacttgttggacaatgaatatgaatcaaagaatcaatgaacaagatgagtaatagagatagaaaaacaaaaacacaagcaaattatactggttcacttcacaacagaagctacatccagtttcttctaattcacactgaattacagttccactattataaatttttgttcttacaagcttttacaaaacctccctttatcaacactagataaagaatagaaatgtaaaacctattagacttctaaagagcaagaaccagagaacactactctgttctttagctagagaacccttctctagacctaagcaagaagaacccacttacaatagccaattacaacagaaattcaaaacgaatttacaaataaagattaaggagagaagcaacttgatgatccaatgaaagtaatgcacatgagttaccaagtcaggttgaatatcaaacaaaatcagaacatgtttttctttaaccttgaaaagtttcttgctcaagaatcattcaaagacccatgaatgttttgaatgaagcaaaaattaatagaactcataaaatcactttaaaagacttagaatgctagtgtaaacttagaaatacgaagtggtcaagttagaaaacaagccaagtcttcaaacttatttataacagattttgtaactaactgtaatcgacacgccagataatcgattaaaatgcttatgtaatcgattaaattatcacttaattgattaaaatgttcaaaaagatttatgggttccagtaacgagcaaaataatcgattaaaccgatctgtaatcgattaagaaagaaagttcagtttcacaaaatgaactgtgtaatcgattacggataatggtaatcgattaagtcagaaaataggtttttaccaaataaactatgtaatcgattacggatattgataatcgattatcacagcaaggctcaaaatatatttttaaccatttagtcgattacactatgtaagtaatcgattaaaacatttaataagcagttcagtttcaatcaaaggccaaataatcgattaatccaataggtaatcgattaagttgttcatgaaggtttttccagattgaacgaagaacaaaatagtcgattataacattaaataatcgattaaaacagtaaaaaattatttttccaaaaaccttttaatcagattaaatccttaaccaaaaagataaaaaaattgatgttttaatgaaaaccatttaagcttgttaatggatgaatgaatgcaatgcaaggatcaacagattgtctttctcttacacttgattcatttacaaaacttcaaggcacttcaagcatgctgaaagctcaaaacacatttatgaatcaaagtctttcactcttcattattctctccctatatccaacaacatttataaaaaataatctcggcagacataaacaaaaaaacctagccaacgtcgatcaaaaaatagtctcgacgaatgttggccaaaaagactttgatctcatcgatgatagagtgcttttagttaaatttttgtctatcattcttagcttatttgacctctcttggacctttattttcctattctaatacagtttttggcttaggcaagtaagtgggcttaattgctaattgttgcgtatttttggatttttgctcacttgatatatctgacttgtgcagggcctatagagtgctatcaatcttcgaatggagcgttctaggagtccctggaaagataacaaaaagatctacaagtttgctagaaatagcccgaggtcaattctgtcattttgagggtcattttgagctttgaagttagcacctctgcacttataatttgggctgcgaatttgattctcatggttgtaaatagtaaataattagatttttgggtttttttatggcccattctattttcagaacttagtcactaatatattagttactttagtgaaaacttggacaacacttttacattcaataaaaatagttttttacttttctttcttttagtttttaggatcaaactcttgttctttattttctctcatttgttcttcattgttcttcattttcttcattttcatcttgctacccttttattttactgcactcatttcatgggactttccatggtgatgatcatgagaggctaaatcatcaatcaatccaaggatccatatcaagcaagagaagaattgaagttctggtttggtatttcaaattctatttgaatgttcatcttcttcttcaatttctattatgttttcatgattatgaatgcatttaggattgaaaatgaattaggattatggattcatgttttaatttcaaataataatcacaagattaattgaatgatattttagttagggttgtggtttcaatcaatttaggagcaggattgattgaactgattttattgagattgaatgaatgttcatgatagaatcaatttatgggaatgatgatgattcgaatagcttgggttggtgaattggattgatgctttctaatctgttttactttactccttgataatcttgttaatttttgcattgttctttaattttagtttgtgttcttgcatattttactttacgtataccaactgtttgacaaaatccccccttattattaccaatgatttgaagctagaaccatattgatcgtgtctctaagtcgacctaggttagcactgtgctacagaattagcttagtaaaattgtttttgatgcgtctcgataaagctaatatcaatcgaccaaaaaaaatcgcaatcaatgttggccaaaaaaccttaccaacattaaccaaaaaataggctcaacaaatgacgacttaaaattatgattagttgatatcaaccaaaataactctagacgacatcgaccaaaaaatggctcctaacaaagttagccaaaaaaacctagccgtcattgtccaaaaaattgtattggatttaaaaatccaaacaaatatccaatccatatccaattaattggattggagtttaaaatccaaaaaattggatttggatatgaaactaatccatttaaatggatttaaagtggattagattgaattggataattattttatggatatgaatttttttgcagagccctaattgtgaggataaatcatgtgtatagggagagtaattgtgtagttgactttttggcagctttggctcattccaggcccctagggttgtatgtttccagtcctttccttttgtttgttcccttcttctgcttagggtcttggttgctaggcctacggtccgtagtgttccagttgtgtactgtttgggtgttttgcccccacaaaataaaaaaatgatattatattagcaaaatcaaaaactcaaacctcaaaaataaattgcaagaaatgaataatgtgtccagagagagctgccagtaattaaattaaaaataagtttttattttggaaaaatagttttcgaaaataaatttgaattcaaaagtttgagcatacatagaaaaaactagaaattgaatttctctacacttgtcatatatccataaaaataattaacttaattgtgcaattattaataatttttttaaaatgcttgttttaactccaaaaaaactaatatattaaataaaacaagggaaattactaataaaaaattgcaaaactaatctctttactctaatgtatatccttcaatgtcagttttaaagaaaaaaatataagctagaggtttgaaaaaattatttgaaacttgaacaattaaaatatataaacgttataaagaatgttgttgaaaaatggaatggattaacaagaagaagatgcctagtcaccttttttattgttttattgtgattttaaagtgccacaaaacttgatatgtggaagacacattgtattgattgttttagaatctaggcatatgtgtgtatggttagttatatataggggtgagtatacacactcaagtccacagatcgacccgttactttcgtggatcttacgaataaccttttttttttataattcgcatagttatatcgagtttctgagtttggtctattaagcttgcaaacctcacgggttttatccatggacttgtggactacccgtttaacccggctaagcctaatgtgcaagtattgttaatttgttattttaagattttgatctttaatttaagttattattgttattttgttttgtttaaaatgttggtatattttagtgtgatagatttaaacttaaaaaatgaagtcaaattttttcttttaaatttataccctttcacttttttaaaaatattgtttttttcaaattactatttgagcccacaaactagtctgtttatctgcaaacttttgcgggccggttacaaaccttgcaaaaaagtccatttattttgcggacgaggcttacctggtgatagaggactatccaaggagcatgaagttctagaaatactccatggattgaagggtccaatgacaaggtccaaagccaaacttcttcaagaagtgatgaccaaaataatcatggctggactagttaacaagggcaaggatgaaggaagacacaaggagctgaattggagcaccttgaagattattggcgagctaagcgagccacgcctcagcccccttagcgcacaagtcgcgctcaacgcaattccttgacagagagtttttaggcttagcgcatgctgctcgcttagtgcgatgccttggctcgcttagcgtgcatgtcgcacttaaagcaattccttgacataaatttttttagcttagtgcgcaatgacccgctcatcgcgccacctttgcaggatttttataatttttttatttttgtaataagcttaattgttacaaaaaaataggcttaaattgcacgttttacgtgtttcttagaggcctaactccataagtactcaattatttgctatttttggacaactttgattaatgaaattaagcatttgcttgaattgagagcttagcctcttcttgattcttgattgaaaccaattcgattcttatcaagaaagctttcctttgtggtgaatcctcctccaacttatcactctgttacggatcgtggcgtcattcattgtcatcttcttaatcttcaccatttttttgtttaagttttcaaacaactatccatggagtcttgaagtttgcatctgaaaatggtccaatccaagcattcatgtcttggtagtcatcacctggcccatctagaatgcaggcttcacgggttgagccttaacaggggggccgatccatatacatacccctagttatatgtcttatgtttaagcctataaacttatcatagatctagaaatgcatagtgccttgataattctaagtaaaatttgaattgaacctgttgtaaatgattaattgatatataaccggttaattcatttttgaatggatctgggaagtgatataaagcattagttatcggttaatcctcaagttaatagattaagcaagcttagacttgaatgcaaaagagaacttactcctattttaatcgatcagacctcatgttaatcgattacatacaaatgttgtgttctttgtttgaattcttgttgttttaatttattacacatcgaatgaatcgattaaatgcattcaaatgcaaacccaagtgcatgaagaacaaaataaccgattacattggtttgataatcaattattcttgttgcaatttaaattttttataaatagtcaccctgtgactaccttcatattactattttcgaaacccacttttaaatatgatagaagagagacctcagaagagtgttttgcaaagctttgatcaacaaacaacacattttggatttcttatcaaagatcaaggctatgacattactatggagcactcttgagcttaagtgatggatttctgcataactaggtgtactttaatccatattctttgtgatttttcattaggttcttgtttttagatagggtttctaagattgtatgtggcaggattccacatagggacttatttcttgaagggttcaagaagggggacagtagtatagaatattctgaatgtaggtcctaaaagatgaaaccaatataaatccttttgtttcatttatcttctccactcttaaagacttcacagcttatcattgttattgaaagtttattatccagttttcatattcaattcatatcttgggatattaaaagaaattcacatcttaggatattattcgtttctttcaaaatcttgtataattaacttgtttagaaaactgattttgagatttagaggagttgaaagaaaatttaaatacactgctttttgaaagagtcattgaatttattcacccctttagattcctagtcaatatccaaacattgtagattaaaatatattctttaatcttttattttatttttaagattcatttatgtttttcacattcaattcatatcttgggatattaaaaaaaagttcgcatcttgagatgttcttccagtttctttcaaaatcttgtataataaacttgttagaaaactgattttgagatttagaagacgtggtaaaaaatttaaatacactgaattttttgcaaatcattgaatctattccctcctctatattcctagtcaatatcctatacattttaagttaaaatacattctttaatattttatattatttttaagattcatttaaatttttatcttttaaaaagattcattttgatcttttaatttttaaatttgagtcattttagtactcttgtcagctttaaaaaataacataattagtatttcacaatagttataaaacatactttgtggcagttttaaatcttaagtaaactaaaggatgaaaataacttaaatttaaaagttaaaaaaataaaacgacttaaatttaaaaattgaaggaccaaacaaaacttaatagattttaagcaaagttttatttcattatgatatataaaaagcctcctccacaatgtctttatttatttggaaatatatttaatgaaatataggtttaaaaagttatatatatatatatatatatatatatatatatatatatatatatatatatatatatatatatgggtgtgtgtattatgttccgtgtaatgcaactatttcttttataactagatgaatttttatgtaaaatggttctctttgtgtgatatataactatttcttatgatcgcttttaagtaaacgttgttaaaaaacgaatttgtttttaaagtcaacattattcaaccatttttgctctattatttttactgagcattcacattttttatttttttttgttagaaaggatgaaaaaataaaataaaactaagctctaggaaagaaaaccccatagcatcatccagcaaattcaggtcctatttatttagggtggcagtgagtttttgatttttgatttttaaatatattttcaaaataaaacgcattcgacaaaaatggagttgaattagtttttaattcaattttaaaatggttttatattcattatcaaaatcaatttttattgttaatctaatttttaattttaaaaaatacattctaaccatcaccacacactacaaccgacaccaccaccaccactattgtctcatccatcgtcgtcgttgttgtcgctaccactattccacaacaccatcgttgttgccttcatcaccatcattcgactgtagttgtcactattcttcccaccaccatccataatttaaaaaattgaaccggtgattgacctggtcaaggcattgagtcactaggtcaattgtcaaaccaatgcatcaattgatccacatgattagggatgacaaagtctacgcagaccctatgggtacccgtaaaaatatctgcaagcgtggaggataattaccctcatattagagatggggatgagggcagtatttatccgtaaatttatgtgggtatggtactgtagtatccatcccgctccatcccacacatgtcatatatatattaaatataattatatgctatttaagtaattaatatatattatatataaattttttgtgaaaaataattatgtatttttttaattttatgtctaactctaacactttaacggtgagtctgtggctatgaaccctaagggggcatttaataggggagcagctttttcatgtctaagaatcatttggttggtcattgagaatctttagataagtttctcaggaatcaaaaagttatgcatacttttattgattattttaattatttaacatagtatataatttataaagaataacatgacatttttattgtagtaaaataaaaattcgggaagtaagattctcactcccccatgtgaaagtttttatgggaaattgattaaaaaatattatcgaaaagcatcatttcctagattttaaaaaaaaatgcatcaaacatgagaatctaaatttcccatcatatgattcttgtgaaactaaaaacttctcttctaccaaatgtaccctaaatctaattccaatcccacgtacaacattaggcatcttcctcttacctatcttagtgcgagttcaagacttcgagtgtcgacaccactgtgactatgcctgatcatctacgacttcaagcttcactgtaagtccgacagcaccgtgagtctgtgcgagtgcgacaccactatgattgtgcccctcatcgtgcgaccccatctcacctttagacttcatttgtaccagtttcatttttttcattcatctgtgtcttttcctcatagtactatctcatcgggacaccactagtagactgaactgaaaattgtttctaccatatgctagggttgtgctacattttttttccttcattgataccttgcacaatgcttagctagttgtcttatgcactagatgagtttaaaagagttgtagttgttattgtgaatgaaacaattgagatacaaataatgtctgaaatagatctgtacttggacgagaaagttttgcccaggagtgctaattttgacattcttgggtggaaaacaaatgggatcaagtatccaattatgacaaaaattgctaaggatgtttgacaatcccaatttctgcttaagaatttgtttttagcacaagagttaggttgttgagatctctacttatgtgtgcacaaagctggttgaaacataagcaataaggtaatgaaagttatattgttttatttattcaattagacttgtttttatctactattgatagttttaattaccatttttgatagtctaatccttaatcttcttatcatgttctagtttctattggtattagtgaaccaaagcaatatataaactttgaagataaatgctttcaaaaatatgaagaagatgcttctgatgatgaagtccaatatcatatctatttttttttcttgaaattttataatatataattataagttaattagttttactatattcttttttgacagaggattaccatcatcacatgatttgcaagtttaattagagttttcattatgtgattagaatattaactttaagaatctctatgttcaatgattatatttgtaatgtttatttataacttgagcttggacaaagtagtgttatgtttgcttgttttaatatcatgtgtggttgcttttaatgttatattttcaaaatttaagaatgcatttttaatttactactagcaattgttttgattaattttatttgttgatttattaattttatacgtaagtaaaatgcgggttgtgcgtatatgtatataggtatccaacaaagatggggatgatgattaaagttattacccgcatgagtatgagaccgggtatgaggatttttttttagaatgcgggtatggaaattggtgctataggaccccgaccaaatcccacccattgccatccctacgcatgaccgacctttattaaattaaaataaaataaaattataccccaacttaattgactcgcataacccaatgtgtttcctcccttgggtatgacccaaactgggtcaaccggtaaccggtttaaactcaaatatgaccaagtcgtatcggattgcactaggttcaatgcgtggttgatgtgataggcaactcaacccagccaaacatccgatcgcagtggaactgatccgactaactgggttgatctgggttttaaagcattgtcatcaccattccattgctattaccatcaccatcaccattccaccattgccaccactatttcagccccaccaccaccactaccaccaccacattcattgtcaccactcttaccctgctacatctgtcactaccattatatcataatctcgagagaaaataaaacaattaattcattttattatctttaatttataacatttttaaataaattaaaaataaagaataaatcaaaactcaaaactaaaactgattttaatttttaaaaatttcaaaactaaaaataaaaaattactccaaacaaaacctaagctaacatcaaactaggtggtgggtcatgaagaaccacctgtttgtcatcagcctcagctccaacttagccaaggcatcaacgcacggatttcccaacctcgctccaacaatctttgaatatgaatgatctcattgctatatctatgaaaaagcaaattaaaggcttcttcttatgtagatccagcataagacaagaattcgaataacacatctttcgaaacttattgccgctgagcaacaaatgtatatttaatatttatatttatttttaaacaaattgtgatatacataaattatatcaaaaaatacaaagaaatcaaagtgacccgtgtgcaggcacgagtaactaacaatttcccaaatataacatatcttaatagtgtatacggaaatacgctttttatttaataattttcaaatttatagattatagattgactatatagatcaaagatagataaatatataaattaaaaaaaataaatatatagatataatgtttttgacaccacaaaaaaaaaagtgtatttccgaaggataaaaattcgtcggaaatttcagcatttctgacggatttttccgacggaaagtaatttttgacggattattttctgtcggaaaaatttcgtcggaaatatttacattaccgacggaaatgaccgtcggtaattattccgtggaaaataattcaatttccaacggatttttcgacggacaaaattccgtcggtaattttagcatttccgacatatattttcgtcaataattttagcatttccgacggaaaatattatgttttaaatattttagtaaatgagggaaatttggtggtggatcagagagtattatgtggataatattttcggaatcatattttcggaaaaattgttcgtcgaaacaatttacattgcattgatatttttttgtgcaatgaaaaattttgtactttgcatgaaaatgttatatattttgtacatttattatttttatcatttgctttattacttgtaagatgtaaaaagacgtataatattactgtaaataaatttattgaacatttttttattcacaataacactagtatgtaataagtaaaaggaatgatcatctacccaattcccctaataaaagattttaattgagaggataaatatttaacaactctatttttcaatgtccataattacttgaagtaacataatgatgttgtttattaaataattattaaatattaattttttaaatataattataagaaaaaaatcaattttttaaacaatttgatccataactttaataaaccctactataaatcaatgtaggagtgtgaaaaaataatttaaaattaattgattttgcattgaaatttaatcaaattgatttttagacaaatcgaggtatttaaaatgatgtaaatgatgattttgaaaacaaaatccgtgattatactatccgttatgtgacttaacttgtcttgttattttgaatagttcgtttaaaatattaaaattatactttttaatgtatcattattttcgtttgactataataaactaattacaaattattttataaaataactttaaatgaagttattcacagtatgatttgttttttaattcccctatttgttattaatttagctgctaaaataaagtttttttcaaatatatttttttaaaaaaattcatacaagctaaatactatatttaaataaagtttactttatttaattttgtttaatgtgtctgcataaagccaattaaagtataaactatttttatagtacatattatgttaagcttagtaaatacattgtgttttcaatttttttttttgattacataaaaatgtttaaataagtttatattttgatataacaaacgtttaattatttgaaatggttccctaattgagacaccaatttttattggatattaagcacgaaaaatattgctgaccaattcttagagttgcatattttttctcgcaatcctcatttttgtattatttacgcaatgaaatattttgtgacatcaatttggtgttattaaaaatacaaaataataatttgaagattattcatttattgtttaggttaaagataattaaaaatatataaaaaaaatgtaaattatttaatagctagttttttgttgtttactttaattagatactttgaacttggtttatttaattttttatattgtcgtcaatcacgtgtgtttgacttgtgaaatcgcaacccacaccaaacattgatccgaaacaaaacacgatcacacacaattttaaaataaaaataactaccataaatcaattgaaatagtaaagtatgtaactgttgtacggatatacggacaatgaaaacccatcaaacattaaagaaaacaataaaatgggtcatgatcagtcgtcactcctcgccctgtctaatgtcatcctcaggctcagcaacctgagctgcctcaggaatgggtatgggtggctctgtaccatgtgagggtcctggaggagtaggagcaactggtgattctgatggttgctgggaacgtgctgctgtagctggatactgggttggtacccactggtgttcatgccaatctggttgcaaatgtcctctaacatccgtgtctggtaatgcagctgagtccggacgaaggcctgaagggctaggtaactaggtgagtcctcatatagaagctgacgttcgggtgcctgctggggggagaagaaggaggagataaatgtggtgcagggacctgtggctgaggaaccccaggctcaggtaactctcgaggactcgcagcaagctcctctggtgatagttttgaagctctgatgacctgctcctctgtagcgctcttcatagcatcaaggtaagtcttgtggctcatcagagaagcgatctggacatccattggctcctcatcagggatctcaacacccgcttgtcaacacaggtgagaaatcaaagacgagtgacctagccatgacttactgctagcgtcctgaatcatgtgaagaatccggttagataaaacgtttgcgatgtaaagattaccttcgccccgaagtacatataaaaggatggcgcgttttacattcacatccgtcatatttgtcgaaggaatgacggtgtggttcacaaactggtgccaaaacgctgcatcacccactagatcgtgtttcctcaacttttccagaacgtaatctaaaccgcccttcgtcttccagctggtatataatcctgtgatgccatgcctgatcctgtcgactagctcaggcatttcatctctgtacatcttcgtcaatacgtctggctgtatccttataaacaactgaccaaactcgcatctgtcgaaaggatcgtagctggtatcgagaaatctctcgatagtcttgtcgtcaaaggggacctgtttccctcttacccagctaaccctctgactggagactgtggtttggtcgacgtttgatagaaactcttttaaaatggcattggaactaggctccgcgaagttgactagcctcttccactgtcgcctgatgatgacctccaatatagggttcccctcaggcaatgtctcccataagatcttcttctcggggatgatcttcttagggaggtaccacgcgtcaaatctgtcctcacattcctgggaacggaagcggccttcatcataccctgttacacgggtccgcttgttggtcaaggcatttgtgattttcttcttcctcttttccacttgtttgccctgaaattcataaaacacgaatgcttttacatccacttataacatattaaggacagagtacaaacacgaatttcaatcttttataacattctcattcagacttgcaataaagacaaggacacacatatttaaggaatcaaaatcatcacaagcctgcaatttcacattaacaatatatttaaattcatgtaaatcataatccacaacaattgattccactgaagcacacattaagtatgaaataaaggaggtgctttgagcaatatgactaataaaaggccaggtgctctgagctctatgtttaccatgtatacctgtctaaccactatgtcaattagttattgtgctgacttaacactctaaccatctaactataggaatttgagaatttaaatggcattataattccaggtaataaaattctgaattataattaaattgttgagattgtggaggcactactttgttcaaagttttatttgtgcatagaaatgttgggcacttcagaaattgtgccattttataggcatcctgtacaataagagttgggtacttgagtgttgtttggtttgagaaaatattttctattttcaatatgtataggtattagtgagaacaaaaaatgaaaacacaacaatccaaagttgttttcattatttttttgtaacctttttaaaacagaataaagtggaaacgaggtaactttttttgtaattaaaagtgaaaatagaaaataaaaacagaacatttttctcaaacctaacagcctcaggttgcaggtttgtattttgcccaatatatttacaacgaataatgaataatgttttcatttcaaattctactaacatacgaaaacagcctgtgtaggatcctaaatcaagataaaagccataactggttttgcctttagttttgcaatcctctcttccagtttcatgtttttgtctcaaatttgtgtgtaaagtgatggcaacttgccaatagattttcatgttatgataccattttcttgtataatgtttcttctgtttttagacatcactgatatgatttcacagatacatattaatgttgtgcttgtatcctaaattttttaatcatggtatgggctttgtacacagtttccattgttcaccctaacctttgtttacacaaatgttgcagtttgggtatattgtgttgactacctcagctggcatcatggatcatgaagaggctaggagaaagaatgttggtgggaaagtgttgggtttcttttaatagtttagttagtttcctttgaagattttgctctcatttcagttcttgaaactcaccagttgtaatgatcaatgtgttagacccgtagtttatcaattatagcatagcatttttctgtctctcccctgtccacatggcttaaagccaactctctaaaacaaaatttgaacctatatggactttacatttttacaatagctaaaacctggcttgaaaatggttcctttcccacccaatgacttgtgtgctataaaacaatgtctgataggtttggtacatagaaagtttaaaaactaatagtaagaaaaggttattatgagaagctgcaatattatgcaggttttgctaaaatttcactaatttagcatcgcttattatgttaattatatttggaatattattagtattttcctcaatctaagtcattactctattaatgttatgaccaagaactcagttctatagtcaaattggaattaaattgtataacaccaacaaatcttatttatacaagcaaacacatgcaacatcatgtcaatggacctgtttacacagagacgtgtttgcaattacataaggtttgtaacttcaaatatcttgtaattgaataatattttataacacaaacaaattttataacttcaaacacatctctctgtaagtgcggacattgcaaacaaaagcaacatcatgtcattttggtgttgttggatggttaagggagaagggaagagggaagatgtcacaggattgatcccttctgataaaaaaattaacattctaataaactaacatgttattgataaaaaaaataaaaagaagcaacatcaacccaaacagtttcagaacacattcccccccaatgactcacagaatattcaatcaatgtatacacttaagcaatattcattcaatgtatacacttacgcattcagaccatgatctacattcaatgtaccttatcgcctgccattgacttccctcaatatccactccaatgaagcttacagaggaagggtgaaattgggggtcacgatgagtgcagggaatgttatgctttccgtccgttactgcagttacccaattgaagtcgtgtttttactgtagtgaacatgtgcagagcagttaccaagttgactgtaacatgcgccttttgatgtgctgtttcgaccttttaaaaaaccagaaagacgatgccgcacgatcagcgtcaatatccccgctaaccgtgtggaacacaaatgaagaagtttcatttcgaactgatggcgcaggtagcgccattattcgcgctgatagcgtctaccttcagttgcaaatgggaagatcggccatgccgcactgacagcggtgtattcgcgctaatagcgcgacacattggaatgggtatgtaagtgcgggcttatgacgctatctgcgtgaaaaacaacgcgaatcgcgccagaggtgacatcctcacttaaagggtcggcaaggtggcgctgttggcgtcagtgaccccgcgaatagtgccatcaatgtagctgaatataggaagtgcggccatgtagcgctactcgcgcggcatctgcgctgatagcgtcagccacaaccattaggatcatttttgtggcgcggatcgtgctgaattcgtgctgttagcgcgagacacctaaaatggtatgggaaagtcggccaaatcacgctattagcgccgaacctgcgccaacagcgccatgtatgtgctttccctttatttggtgcgccaatatggcgcggattgcgttggtgtccacgctgatcgcgtggattacaaaattttgaaatctgggtcgctcaaaaattatatattaatggttatatacaaaagcaaagtcacaaaaatgagaaaagagctgacacagggcacattgtatctcagtaactttcccctttcacacttattctgaaaccctaggtcacttacccccttcatcctcagcctaagtaggagccttctccctctaaatctgctggctgaagttctgtttgaagcactgatataggaaataaaaaggtatgttttaagcctttcagagttaacattttattttacttcatctttcattcaatggctgtggaaaaaaaacatttaacacccacagtggataatgaaactgctggtgtttctggttcctcttgtatttggctcctatgttcttgtaccaattgattcttaccacttccctacattcttaagcctttattttcctctatccctacaaaatcttgccatttattaggtgtaaatgatatgcttagtgggacttgctggatagtaatggttattgtgttagtagtttggttaatggttttgtggctaattaattatgtgtttgattatttcttaaacagttacctttgtggagattggagacaagactttgaaatatcttgggctaattgatgagcttgatgatacttcttcaacttctttagaatcagaatcttctcatactccacctcaaccataacagcaagaggtactgatcttaatattttgcttcaattcttcaatggtgttaagattagtgtgcaactggtgtactgatgataaagtaagttgtatgcttaattggcttacaacatttctcgttttcaaaacaagctaggctagaccgttacttctaattaaatggcttccaattagttgtaatgcaacattaattatttctttaatcatgtaattaaacttttttccccccttaaataaccaaattcaattgccaaaatgcaatagtggatacccatagtgatattatttaagttggttttttcttcaatctaaaccacaataaaaacattaaaccccatagtggatacccaaacttctgctgagagagtgatggaaatatttattaggggtttgtgagtttgaggggttgagagaggatagagttgaaagttctacagcctgggtattggggagtgggagtgaggtgagcttttggtaagtacaatggggtggtcataagtgtgtatactactagcttgcttatattatggctatgtgatttatcggtctgtcattgactttacataaattgtagcctgtgcttgttttggtatatcaatttgttactatatacttacctaacttagtaaatattcagatccttacttatgcattttgcattattcatttggttgaccccttctcactgaaagcatacaataatggaaggtgggactttttacatggctaatagagttgataatgtaatccaacatttatgactcacaacatgtaaatcatttattttttccagtttgaccaacaacaagaagataaacaaccgtgcacaaaatagttacctgcagcataacaacaggcaagttgaatgttctgtttaagacaataattggaatagcgagtttttatcatgctgtcaattgttgggctgactgctgttctgtgctagctgcaataatatatgtttcttttttatagcttatgatgtagtatattcgtatggtgcttatatttatgaaaggcgtcagtaatgttttctgtcaacaatggccttgtctttaagttgaaaatattgtttactttggtgatgacaactacgccctataggtattagtgagaacaactacatttagggtgactgtgtaggttgtaattaattatggtatgtttgatgacatagttttgtggcgcagtggaaacaacattacatagctttgccggatcctcaacctttatcactaagtattatacgcaggtacttttttgacaacaagttatcaaacttagtcacacaattcacacctataacaacatcttaatggagtgtgaacattgctattttacacaataacgttataaaaaaattaaatgtttaagtatgatgcatgtgttatttatatttatggtgctgttaatgtgattaattgttcttactttgttcatttatgaaagcaaagattatgtatgtaatttttgtgttgacgtaaaacatgattatcattaggaacactgattgaatcattcatgtgatttatgaatgttcctatttttggccataatgtacaaaacatgaactacattccttctaatcgactttggatgtacgatagatgttatagtcgtagaaatggtctgaaagagtcttttgtcggggggggggggggttgatgagtttgtgaacaaagctagccaacagcaatgttactgcaatgatggggggatcagatgtccttgtgttaaatgtgatagtactaggattttggaggatagagttgtcaaagttcatttatacaaatatgggttcaggcctaattattgggtttggattgatcaaggtgaagacatgtcacatcctcgtttcaatgacgagcatggtaacattgatgcatcaaataccacatcaaatgtgggtggagttgaagaatttttgtttatgcaagacatggtgtatatgctctcagacaagcagagacatttgaggttccaaactcaaataacatggaagagcctcccaatgaagatacacaaagattttacaatttattgttggatgcgaatcatcccttgtacgaaggggcatccgactcaaaattatcaatttccgcaagacttttagcctgcaagtccaattggaatgttccagaccaatgcttagagtttatttcaaaaatgcttttggatgtcacacctataaaagaacgtgtgcctaaaagcttttatgatgcaaagaggttgatatctaagttgggattggaggctaagaggattgattgttgtgtcgatgggtgcatgttatattataaaaatgatggggcattaactgaatgcaaattttgtaacaagcccagatatcgtgttaatagtctgggatcaaataataacaaatcaattccagtaaaggcgatgttctacttgcttataattccaaggttgcagagaatgtttgcatctcagcaaactgctagctagatgtcatggcatcatcacaatacaaatagttcagggacattacgtcatccctctgatggtgaagcttggaagcactttgatcgagtacatggagactttgctagtgatcctcacaatgttcgacttggtttatgcacagatggatttaacccatatattcaagcatcagctacaccgtattcgtgtttgaaacgaccgcttctactttgctttttatttcgtatttatttgtatttgctaaaaataaattttcgaaaagcaagaagaataaaagttcaaacgtatcttggttgattttttttttaaaaaaaacgaatttagaaatgaaggttcaaatgaaaattccgaacgagtttagagattataaaagttttcacgccttattttaaacatatagtccatgacgttcaaacataccacacagtccattattacatatccagagtcccatatataaacagtccgtagtacagtccatagtacatcgcaagcacacatcatcaaaagcatacaaccagcatacaatcttcattctatcttctcgcatgacatccatatcactgtttttctgctcgcccaaataaattggggtcatgacaggtgtcaaccaccagacacaacacagggttagttttgataaacaaaatttaaatatcaacataccaaataataaatcaaatttaattaccaacggaacaaataataaatatacgtaaacaattattcaaaatgtaaaatgaatcattttcacacacataattgttatgaaatgcatgctcatcttattatatgatgcatgactgagatctcagcttaacgtctcaaaatttgtggccactgtcagataaccccaccctcaccttagtggaacgaccttatccatcccgtcagggtagcccagtgtcgcgtaggagtctcactcccatccatgtgatcatcatggtggtgtggttccccactatctcaactacccccaagttaaaaacacgtatggaactcagtttagttatctgacactctaaacacctcttaacgaggatcatctcatcgtctcaattttaccccacagggtagatgcacatgaaaatgcacacatgatttatttttcatctttttaattatttttcatcatcttcatttcaaattctcaactcaatatcatctcatagttcacctcttaaatcaccactcatcatcttgaattgttcagaatcacatatagatgttgtatttgtttcacgcgtctaaattatttttcacgtcacataaaagaacatttttatacagattctttaatcaacagcatacagatttactaattatacagatttatttattaacatacagaatacagatttactaattatacagatttatttattaacatacagatttgtttaagaacagcttacagatcaattatcaacatacagtttgatttcaacaacatacagattaacaacaacagcatacagattaacaacaacagcctacagattaatttagcaattacatacggattatacagatttatttatcatacagattaatttctctcacaacatacaggatcacctaatgtgctttaatttacaacaactatataattttatttatagaagtacaaataacaatttaatcatcataaaaataaacaaacagcatctataaattttacaacatctaccattatttctataattgatttttttgttcatttatgacttttactaaagcatactaactcaaagttttctcaactctaattctactatattgaaaattacactattctaatcatctacttaatatctttattaatacaataaaatgaaatcatcataatcaaatatcacaacaatataatttcataaaataagaagttaaatacttagcttaatcatgtttgtttcattcctctaaataacttacctaatcaacttgattctctaaatcttttattcctcttatatttttacttaattctattttaattcaagtaatcaattggttgagattatagattagtttgtggtaagctaatacttaaactttatttaagaaaactcccccttaccttaaataatttttttcaaattgaacaaactgctccttgatttctccctcacgtgagcttgcttgacctttaggagtgtttttccttttgtgaaaatgatggctcaaggtacggatggatgcttggtgtggtgattcaattaaaacttgaaaacaaacttctaatgtggtggggcaaatgttgcacggtttgtttcccttagctgtttggaattctttttcctatgaaaatgattagatacggttgagcttggtttatgggattcaaagattcaacaaaatgaaaagcaagtggggtaatagctgcacgatttccttctttttagctgaccaaaattgtactcctttgcttccttatatagtggagtcaaaccatggttttatttctattggtgaatggcctagctattttggtccacaaaatcttgttgcctcaataatatgcacggataaggctgatggtgagcagattttttttctcaacattcattgtatattccttgttgtacttggtcttatcctcccattaatggcttgtctccaattatattcccactttacacatgcttactttcaattggctatccctttttgctcttgacttggccccccaccttatactttcagtttgtattttacgtggacttcatgatgaaaagcttatttgtgatttttttttcttcctaaccgagcactcccttggttccatgcatattgcttctctttttgtcttattttagtttttagtgattttgcttacacatggtctataaaataacttctatccatctagattttttttccaattccttccttcttaatcacacggttcatatagcttttaagaccaaagttaccatattttccttttattccatgaaataacataaatcttgtgtttttgttgttttaatttataaaatcactaaactatcttaataacttagtctatttagtccataatctcaagaaaattcctaaaatgatattcatcatttttctctaatttttctagggattagaataacttagattgaattttatttcaaaaggtatgttaaattctaaaaatcttactagatagtgaatgataattttctaatcgttctaaagtgtttcctttaatccatattcaataagtaaaatattggggtgttaaaattttcctccccttaaaaaatttcgtcctcgaaatttacctgattcaaagagtgccgggtaattcttcctcatttcgctttccacttcccacgtcgcatctccgttggtactatttccccaaattaccttgaccaaagaaatttattttcctcttaaggccttaactcttctatcctcaatctttactggaaatgcttcataagtcaaattatcctttataggaacttcatccacttctataacatgtgaaggatcatggatatatttacgaatttgagacacatggaacacattatggagattagacagatttgggggtaaagcaatttgataagctacgggtccgactcttttgataatctggaaaggtccaatgaaacgcggtgtaagttttcgagatttcagagctctccctacacccgtccaaggatttactcttaaaaacacatgatctcccacctcaaactctaaatcctttcttcttctatcatggtaacttttctgcctactctgtgcggctttcatcttttcttgaatcatcttaattttatcagtagtctgctataaaatttctggtcctaaaattaagttttctccaggttctgcccaacacagaggggttctacacttcctgccatacagtgcttcatatggtgccatacctattgaggaatgaaaactattattgtaagtaaactctattaaaggcaaaaagtcttcccagttacctttgtgctctaaaacacaagctctcaaaagatcctctaaagattggattgtcctttcagactgtccatcagtttgggggtgatatgctgaacttaattttaatctagttcccaaagcttgatgtaaacttccccaaaatcttgaagtaaacctagggtctctatcagaaatgatactagcaggtactccatgtaatctcacaatttcctttatatacagacttgtcaatttttctaaagaatacctaatgttaataggaataaaatgagcagattttgttaacctatctacaaccacccaaatagaatcaaatcctttagaactcttaggtaaagatgttacaaaatccatagctatactatcccacttccactggggtatttctaaaggttgcaacatcccagggggcttttgatgttctatcttggctttctgacaaactaaacaggaaaggacatattcactaatctcctttttcatctttggccaccaaaacatgactcttaaatctttatacatcttagtggctcctggatgtatacttaatttacttttatgtccttcctctaaaatcaatttcttaagttcagaatcattgggtacacacactctcccttgtaaccgtaatacatcatcctttcctatattgaattcactttttcctcccttctttatattttcaattaccttcctcataaaagaatcagatttctgcttactacctaattcctttaaaaaatcattagtcacttgtaaagctcctaatttaatacttacaggtgtagtctcacacatcaaacttaaatccctaaattgttctgacaaatttagttccttaatcatcaaggtggatatcatcaatgatttcctacttaaagcatccgctaccacatttgcttttccaggatggtaattaagttcaaaatcgtaatcctttaaaaattccatccaccttctttgtctcatattcaactctttttgactaaacaaatattttaaactcttatgatcactaaaaacctcaaaatgtgaaccatacaaataatgtctccaaactttcaatgcaaatactacggctgccaattccaaatcacgggtaggataatttctttcatgagttttcaattgcctagatgcataagccactactttcccatcttgcatcaaaactcctcctaaacccattttagatgcatcacaatacactacgaaaggtttttctaaatctggtaacactaacacaggtgccgtagtcagcttttccttaagagtttggaaactttcctcacactgtgcattccacacaaaagcttgacccttcctagtcaaagtagtcataggtaaggctatcttagaaaaatcctgtataaaccttctataataccctgccaaacctaagaaacttttaatttctgtaactgtcttaggtctctcccattccatcacagcttgtacctttgaaggatccaccgaaattcctccttgtgatatttcatgacctaaaaagttaactttttctaaccaaaaatcacacttagacattttagcatacagttgccgatcctttaaagtttgcaaaacaattctcaaatgctcggcatgttcttccttagtcctagaatatactaaaatatcatcaatgaacaccaccacaaatttatcaagataaggatgaaaaactctgttcatataatccataaatacagctggggcattagtcactccaaaaggcattactagatattcataatgaccataccttgtgctaaaagcggttttaggaatatcctcagactttactcgaatctgatgatatcctgatctaaggtcaattttactaaaaacacaagctcctactaattgatccatcagatcatcaatcctaggtaaaggatatttattcttaatcgtcaccttatttaactgcctatagtctatacacattctcatagtaccatcctttttcttaactaacatcacgggagcaccccatggtgacacactaggtcttacaaattgcttatttagcaattcttctacttgtttctttacctcagctaactctacaggagacatcctataaggtgctatagaaataggtccaattccaggaattaagtctatagaaaactcaacttccctctcaggaggtaatctatctacttcttgaaacacctcaggaaattctcttactactagcatatcttcttttccactctcatttccagattcagagtgagtttggatcatgtatacttgaacatcattctttcccatcattttaaggactttgttaggggagataatctgcatatccccactaacttgaggattcccaaaaactatggatttatcaaaacagtttagcatgatatgatgggatgataaccagtccatgcctagtatgatatcaatttgatgcaaaggcaaacaaattagatcaacagaaaacgcatgaccctcaaactctatttgacagttcaaacaaattttagaagtaacaactgacttactagtaggagtagtaactgtcaaaaagaaattcaaaggagacacaggaagatttaaattttgaacacaagtgtaagaaataaacgaatgagtagctccagaatcaaataacacatctaaaggaattttgcttatgaaacatttacctcgtatcagatcttcggattgagaagtctcactcccactaagagcaaatactcttcccttggtctttggtttctctgggggatgactttgacttccctcttctttttttctttgattcagaggacagtgtatggagagatgtcccttcttatggcacacaaaacacgtagggtctctatctggacattgagtagaataatgtccaaactttccacacctgaaacatcgtgtaggaacagacgaagaaacttgacttactggaactcaaacaggaggagcatacgaacgatccctgttataaggttttccaatgtttggacgattcctgcctttattcctcataggtcctatactcttataatgagatgctctggcgcgggaatcttcatcataaattctgcacatattgaccagctgaggaaattgtcgtattccttggtaatttatcgcttgcttaatctccggtcttaatccattcaaaaacttaacacactttgacccttctccttcaactccttgataatgaggaaaatatctgactaattcctcaaatttcaacgcgtactcagccactgttctatttccttgctttaactctagaaactccatttctttcttgttcctaatatcttcaggaaagtatttttccaaaaaggctgctttgaaaacctcccaagtaattagttgattttccgcttctaaccgcaactgggcattctcccaccaatattcagcttcctctgctaacatgtaggtgccataaagtacctttttatcagcagggcaagccatgactcggaaaattttctctatttctcttagccaagattgcgctccatcaggattatatcctcccttaaaggtaggtgggtgatttcgttgaaaactttctatcccttgatactccacatttccattacgttgttgattacccacggcttgtgctaaagcttgtaatgcctcagctatggcacgatcattcctaccagccatttacttttgtacataacaaaaacagttagaacgttataaataaccacacatacatttactaccattatcatacatatggatacaaggagtagttagagtaagactaactacatggatacaagatagttagattaacaacccttacttctcctaaacattctccaaccctattttacacgttttattccttactagcatcattagttgatttattttaccacactacttaatcttacatgcataccacttttatacaaactgccttattttcttgagatttttaatagtagttttgatccacctcttcacccagattctcaaagtaattattctcataatactgctccttgcgactaacgggagcattaggaggtttctcgttcccataatacaccacattttctaccacacggtatatcattttttcaagaatccatggtaccactgttgtttcatgatactctttaatgatagggggctcatcgatcgcaggaatagcatggtatatagctatcttcctatagatagttgtttgttcttccactgaatcctcttgatactgttgaaagtccaccattacaaaattcatgctatgggttccataaacgtccatcttcctaaaaacacttatttaggcaaaagttaaattcatttaaaaaaaatcatacacaacaacataaaagacaaatcatgtcaagcaccatcataaaacagacaaaacagactaacctaagctctgataccacaattgaaacgaccgcttctactttgctttttatttcgtatttatttgtatttgctaaaaataaattttcgaaaagcaagaagaataaaagttcaaacgtatcttggttgatttttttttttttaaaaaaaaatgaatttagaaatgaaggttcaaatgaaaattccgaacgagtttagagattataaaagttttcacgcgttattttaaacatatagtccatgacgttcaaacataccacacagtccattattacatatccagagtctcatatataaacagtccatagtacagtctatagtacatcgcaagcacacatcatcaaaagcatacaaccagcatacaatcttcattctatcttctcgcatgacatccatatcactgtttttctgctcgcccaaataaattggggtcatcacaggtgtcaaccaccagacacaacacagggttagttttgataaacaaaatttaaatatcaacataccaaatattaaatcaaatttaattaccaacggaacaaataataaatatacgtaaacaattattcaaaatgtaaaataaatcattttcacacacataattgttatgaaatgcatgctcatcttattatatgatgcatgactgagatctcagcttaacgtctcaaaatttgtggccactgtcagataaccccaccctcaccttagtggaacgaacttatccatcccgtcagggtagcccagtgtcgcgtaggagtctcactcccatccatgtgatcatcatggtggtgtggttccccactatctcaactacccccaagttagaaacacgtatggaactcagtttagttatctgacactctaaacacctcttaacgaggatcatctcatcgtctcaattttaccccacagggtagatgcacatgaaaatgcacacatgatttatttttcatctttttaattatttttcatcatcttcatttcaaattctcaactcaatatcatctcatagttcacctcttaaatcaccactcatcatcttgaattgttcagaatcacatatagatgttgtatttgtttcacgcgtctaaattatttttcacgtcacataaaagaacatttttatacagattctttaatcaacagcatacagatttactaattatacagatttatttattaacatacagaatacagatttactaattatacagatttatttattaacatacagatttgtttaagaacagcttacagatcaattatcaacatacagtttgatttcaacaacatacagattaacaacaacagcatacagattaacaacaacagcctacagattaatttagcaattacatacggattatacagatttatttatcatacagattaatttctctcacaacatacaggatcacctaatgtgctttaatttacaacaactatataattttatttatagaagtacaaataacaatttaatcatcataaaaataaacaaacagcatctataaattttacaacatctaccattatttctataattgatttttttgttcatttatcacttttactaaagcatactaactcaaagttttctcaactctaattctactatattgaaaattacactattctaatcatctacttaatatctttattaatacaataaaatgaaaccatcataatcaaatatcacaacaatataatttcataaaataaaaagttaaatacttagcttaatcatgtttgtttcattcctctaaataacttacctaatcaacttgattctctaaatcttttattcctcttatatttttacttaattctattttaattcaagtaatcaattggttgagattatagattagtttgtggtaagctaatacttaaactttatttaagaaaactcccccttaccttaattaatttttttcaaattgaacaaactgctccttgatttctccctcacgtgagcttgcttgacctttaggagtgtttttccttttgtgaaaatgatggctcaaggtacggatggatgcttggtgtggtgattcaattaaaacttgaaaacaaacttctaatgtggtggggcaaatgttgcacgatttgtttcccttagctgtttggaattctttttcctatgaaaatgattagatacggttgagcttggtttatgggattcaaagattcaacaaaatgaaaagcaagtggggtaatagctgcacggtttccttctttttagctgaccaaaattgtactcctttgcttccttatataatggagtcaaaccatggctttatttctattggtgaatggcctagctattttggtccacaaaatcttgttgcctcaataatatgcacggataaggctgatggtgagcagatttttttttctcaacattcattgtatattccttgttgtacttggtcttatcctcccattaatggcttgtctccaattatattcccactttacacatgcttactttcaattggctatccctttttgctcttggcttggccccccaccttatactttcaatttgtattttacgtggacttcatgatgaaaagcttatttgtgattttttttcttcctaaccgagcactcccttggttccatgcatattgcttctctttttgtcttattttagtttttagtgattttgcttacacatggtctataaaataacttctatccatctagattttttttccaattccttccttcttaatcacacggttcatatagcttttaagaccaaaattaccatattttccttttattccatgaaataacataaatcttgtgattttgttgttttaatttataaaatcactaaactatcttaataacttagtctatttagtccataatctcaagaaaattcctaaaatgatattcatcatttttctctaatttttctagggattagaataacttagattgaattttatttcaaaaggtatgttaaattctaaaaatcttactagatagtgaatgataattttctaatcgttctaaagtgtttcctttaatccatattcagtaagtaaaatattggggtgttacagtgttggccaatcattgttaccccgtataatcttccacctgaactatgtatgactaaaccttatatgtttttgacttgtttggtactagggccatgtaatccaacagttgggattgatgtttatttacaacctttgattgatgatttgaaaacattgtgggatggtgttgtgacttatgatgtttcaagaactaaaaatttcattatgaaggcaactttgatgtggacgattaatgattttcgatggagcatttgtctgttcatctggcatatgaagctagacttgggggaccagtccaatatagatggatgtatccatttgaaaggtaacatattaattgttgtctatgatttaaaaagtcaaatccataatgttcactactgactagtatcttatgcaaatgttgtagattcatgggtgattgtaaacgagctgtgagaaatagggcgagggttaaaggatcgatttgcgcttcttacttacatcgtgagacaacccaattttgttcgcattatttccataactttatgttgtcgtcacgcaacattaggaatcaaagtacaatgggaagtgatccttgtccccgaatgttatcagtgtttgaccaacaaggtcggccttctgggaaggaggtcatacactggttgacttatgaagaaaaaaactcagcccatgtttatgtcctgattaactgtgccgaagttaggccataccttgagtaagttgacagacttttgttcaaataaatatttagttatggttgttgtccaatggaagcgtaacataaatgatgtatatttgcatatggacaattcatttgtacaaacccaacaaattgctgaaccaaatggatatactaataatgtacatgcggattttccaagatggtttcatgaacaagtatgtatgttatttatcagttaattattgtattgtgttgtgaaaaaaaaattgattcttatactatatgtaggtggtaaattctggtataaatgtgacaaaccaacacttaaaggatttatcatatggtcctatgagttacgttaaacaatggcacacatactttgtcaatggatacaaatttcatactcaagcgtggactgagggcaaaaaaaccataaatagtggggtttatgtcaagggggttacagaaggaggagcagatgatttttatgggatcattaaacatatatatgagctacaatataacagtacaagttatgctaagcaagttgttttgttttattgtgaatggtttgatccatctagtaggggaacaagagtggatcgaaaagatggaaccgtggaaattcaaatggatagaagatataatctatttgatccattcattagtgcacagaatgtcagacaagtgtattatgtgtcctatccagcaataagatcggacaaacgtgattggtgtgttgcaattaaaacaaagcccaggggttacatagaatataacaatgcaccaactgatgtgccttatcaagtagaggaaatgtcacatggtaatgaaatcatcgaagttgaaagcatttctggcttgcaagatcagagaggtggggttgaagaagtggacccagatgatgtattcataaatgattcccaatcaaatactttgcatggacagacaaataatattgaagaagaaaatgaaggcgaattagaagatgattttgaggtttatgattctgaataggattacaaatggattgatgttatgaatctgtatttgacttcagcaattagtgtaaaacaccgtccctaattagttgtaaagaaatttaagatgaaccacctttttttgtatacataggtttgttttatatttggtcatgattacatgcttgcactgctaatgttgaatgttatcatccattcatacggtgattatataccaagttgaatcatgtatgtatgtatgtatgtgttggtttacgcaatttggatgttatataccaagttgagtcatgtattacagctgaatttataatgaatgattatgaaactaaagccaaatagatattatattccattatcgtaacagacttgaatagtttttcaatttagacatactttaagactgtattaatgattacatagttgattttggattacattgaccagactatatggatgctgagagagtaaaagactctttagatttagaggcatccatggatgttgacatagttgaagactctttacatttagaagatgatatgcatgctcagatagttgaagactctttagatttagagaactccatggatgttgagatagttcaagactttttagatgtaaatgactatatggatgttaacagagttgaagactcgttagatttccaggacagtatgagtgttcagagagttgaagactctatacatttagagagagttgaagactcttttgatttagaggactcaacggatgttaacatagttgaagactcttttgatttagacaaagttgaacctatgtttctaagatcagagactgcagagagggaatgccagaaagtaattagacaaatgttaaacatttatcttccaaatttgggagatggaatcaatgatgagacagttgaagactatatagagttaagaagaattagtggctgaaaaacaggatactgaacctatgtttgtgagaaccgagatcacagatagggattgtgaaaaagtattattgtatggatgttgaaacatttgaatatggtttagcgtgtgaagaatctattggcgaaaaagctaacattgaaagcatatatgtacgatctgaaacagcagagagggaatgccaacaagtagttaaagacatgttaaatatttatctttcggacttatgaaatatttattgttttattgtaatggaattgaactttgttaatgtatttgattttttgtgtaaaaggaaaatatgcgagttgggtcaaagtagttaatggtcacacactttaattcccctatcactttttttgtatatatagatatgtcatcaggtggtgctgatcctctccgactgccgatcaatgataacattgacaatcggacaggtggaaagaaaaaacgatatgtgcttagactattaccacctagagataatttgtcgtcgtctacatcatccccgtctaatgtatctatgccaataagatcattagattttttacctacaccatttccaccttcgaatgaagctataccatctattccaattaatgctgctggaccgtccacaatgcctacagacacagcatctcctaccccaggtgcagcaaacataccttctgatgaagatgaagcaaatttggtggtggacgacccccctatcaatgatcgtccgacgattacactgataaatggagcctaagtattaacagtatacataaattataaatatatcatgaccttttattatttttggacataggcattgacatattatttgttgtcttaagttttcatccatctaaggttgcggcaaaggctatcacattgtccattagacaacaatttgatcgcccatggccagcttggggagcaattccaaaagaccatcaagaactgtttttccaacgttttaaggtaatataatgttgcattcctactaatttcaatggcgtaacgatctcctatctttttatggtttaaattgtgttctattgttggtcattgaacatttaaattggtttataattgttgttgttgttaaatacatttgtggttattgttggaagtaatagtaaaatggttgtgtttcaccaataatttttgtggtgagattggtctttatgtatttatatttaatattataactttgtgttaccttacaggaaattggtttggagaccagaggaagagagtgaaattaaaaaagtatttcactcaaaagcctctcataggctttctgaaatgttctgcgatgcccgaaatgaaaataaaagcccatactggattgaagatcgtgtctggaatgatctattatcacattggaatgcacccgagtatcgttcgaagtgtgaaaaggcaaaaaaaatcgagcatctgaaaagggtggctgtatgcacactggtggttctattagcttgcaggatcatgccattcgcttggtaagatgattttacaaatatgcatgttaaatttttgtccatcataaaatgtggttatgttatcatttgttgttatgtttgtaattagtttcaggaacttggtcgatcagcatacattgatgagatttttcaacaaacacatttacggaaggatactggtgaatttgtcgatgatagatctaggcagacacatgtgagatgctaatttgtcatggtttttgtattaaaacatcatgttttattcatttcatgaaataataactgtttttgaatgacaagaaaattttgaggctaaattgtcataagctaggtctgatgttcaatcaagtgttggcgattctgaaatgactctgttgtctcctgctgaagaacaaagactaaggagtcgatgttggattgcagcagctggacctatgcgtaagagacgtctttacggaactggcgatcttgctcattcttataaacgtggagatgagacattcattcaaaacttgcatggctcatctagccatgcctacgaatcagcgaaaattattcaaataaaggaggagctttgtcaatcaaaggaggagttgcgtcaatcaaaagaggcgttgcgtcaatcaacggaacaaatgcgagtttttcaatcagttgtacttcagtttttacctccagaagctcgtagcattatgcagcagcaacaacaactcgctgatgaacaacaccaacaacatgatcaaccacatgatgcgtagcaacaaaacaatgatgaaccagcaaatgaccagcaaggacacgatgacaatgactatgttgattattgacttcgaaacagtttatcagttatcagatgtcgaacaatgtggttttattttatttatatttggaacttattttactttgtttaaacattttgcttttaatgtatgaattcagtctttcattttataatatgctttcttttcattatggtcttatttaatatcaacaattgaacaaaatgttcgtaaaacaaaataaagtattgtatgtgataataaattagctacggaaattaccgacggaatgagcagtaggtaatttctgacggaaatgccatcggaaattaccgatggaaatttccgacggaaatggtcgtcggaaatttccgacggaaatggccgtcggaaatttccgacggaataggccgtcggaaattaccgatggatatgaccgtcgaaaattaccgatggaaatggtcgtcggaaattaccgacggacacaaaatccatttgtcaaatttccaacgaccattttttcgacggatttttgtccgtcggaaatctgtcggaaatgtcgaatttccgatagatttttggtatttccgacggattttggccgtcggaaataccctattttttgtagtgtgaaagtcttgctaattaatatcttaaagacattaattaagaaataaaaaatattacaaaaatgatagaaaaacataaaaagattataaataatatagttttatatattttaataatttttttctctaactttttatgaatgtcctaaagatattaattaatatttatcataattttaaatgacatctgagtgtcattttccatggattaaaacaataaaattcataaaaaaaaaagtatgtgtgttcttctccgctattagccgcacctcacataagggtattcatgggtatgggtcatccgtgaacccgaaccaatccaaactagtattgtgacccgtgcggacgcacgggtcgctttgccactatttttaaaaattaatattataaatttatgtgaaaagaaggcaaacactaagattaacatgaatgcattgaaataaataattttatttaaactaagttaaatataagaagatatgaaaaatattagtatttgtgatattattgataaagtaattaaaaataatatattttgattgtgatattataaatgttattgtgttggttatgggaggaattttttttaaaaaaaaattaactaaagtaaaagaaattattttgaccaaatctaaataagtataaataacatatgacaacatatgtatgctataaatatggacattatcacattatatgaatttggagagttaaaaaacacacaattataagaaatacacataaaatagatataactgagaccaagtgccagccccatgaaaagcaattgaagtagcaacaacaccaaagaagatgaaacacccaacctgatgaccaacatgcacaagattttgtccttaggagcattgaaaacatagtgcagggcaatagtgagttctacaacaccaaggcgtgatcccaaatgacccccggttctagaaacatggaaaataacatcagaacgcgactcatctgcaagttgtttcagttcctgcatcaatgctcatattataagaatcaaatttccacataactatgacacttttttttccttgtttcacaataagcagcataagtcacatgctttaagtcattgtaccttggtagataaattcttcatgtgaattggatagtttatggtgtccaacagaggagttggtcgtttctgagaatagtactctcccctctcagatagtgatgcacatatcccatgtggccttataaatgttggcagactgataataatatcagaatgaataaatttatcaagccttggtaatgaaagaaaaggagtttaatttaaattaaaccaaattcacacacacacacatataaagtagctaaagtcctgaaaaattctatgctaaaacacaaacaaaaaataaaagaattacccagtcctgctgatattgttgtggagcagtgaccagtgccaaaacaatattagctataaaatttttgagttctgacatattatactcaactaaatgaactgattgattgaattatttgtcaaaattaagaaaataaaagaaatttctaatttcatatctaggatttaaataaacgaaatagagtatggcattccatgtgcttgataaatcattttaaactaccagagagcagagacagttaacataaaagaagaaaaagagcaattcaacacaaacccactcttccgtaatgcatagccacgtgtaaaagagcatttgcaactattgggtggtaaaccatatttactggacaccaagccttatttatgagaaaatccatatttaaaactgtgccacgaatacatgatgattaggcttattggcaagcatttcaatgaaaattgagcttaaatcagaaaaataagagaatcaaaatttcccccagaaatttacatggattacagaaattttaatcaatgtatcgtccaaacactatttatagcatagccccttttccattgcaaagaatacaacaaaagccccttggtaataacaacatgatcatcaccataatccacaacatggtaaaaaatttacaatgtcagaatgcacacgtcacactaaacccattccatttccaataacaaaactcaacgacaacaaaagcagttactttaaagcagaaaaggagaaaaaattgtgacagctaaaaagtaaaaacaacacacaaaccaaaaacaggtgaagttgtaattcaaacatgaacaaagcatttctatgtctacactaatgccatctctaagtaaattattagtcttgtatctatatctccagaaattattagtcttatactataaaaaataggttaagttacaattaaaacatgaacaaagcatttatatttctatatctccagaaacatgtaaggattaataaaagtaaaaaaacccgtcaagttttaatttggtaaaacagatatcgcatataatttgtttgtggagtaaacatgataaacaaaatgggaaagtaacattgtaacatgcagaaagtaacaactcacttagcacctgccctactttcctttcataaaagcagaagtgtataacaaaaaagggaaaacacacacaaagaggaaacaaaacacattatctcacaatcaccttttgaagtataacaaatattcaaaattagttaaaatcagcctgaactctatctatactaacttagcaagctattgatgcatcaaagaaaacacaatgataattattaaactgcaatgatacaaaaaggaagtaactttgaagacccaaaatcgcatttccattaattttacctataacagtatttgatatgtccaataactgctgctccattttatccctcgatgtaaataattccatgaacattttctgtgagaaaaatattatacgataattattaaactgaaataattccaaatgataatccctaaacaaagttccttacaaatgttaggtaacccaaatcaaatggtccaacattaaatgtttcacttcaaatatctgtgttgttctgttaaaaaaaattataaattaagaagaataaggcataagtaagccatagctacaaatcgttgtttcagttcagacacagaaaaaaaaggaaaggaaagtagaaaaggaagaagaaacacacaaaattgtgtgaagactgatgtactgtaggcatgtagcctctcatttccttaatgttacactcacaattaaaactttcttaatgaaaatttggaatccaactgcataaatataataagccctttaagaattatgtattcaattctaaatcattatgtggcacactctgtcatattagagcactgtgttaagaatgacgatgcatgtcattatcaatgtttccttgagcatttcataagatatttgtttgtgccatttaagaactacgtgttagtaactgttgagattgcaacaggtatcaaaaccttaaacgaagcaaaaactatgcctattttaaatactgtaaaaagaaattgtaagagaagaaaattagattggtgtttctaccttacagtctaatttaattaaagcattgtgttttaggtcaaaacaaatctgtcaaggaatatttatccaaaaattgaatgtcacatatttataagaaattccacttcaaacaaatctaaatttgcatcaagttcgatttggtgagctatgttaagtgtagtggcaggataagaacaaattttcagctataatatgacttctcaaagtgtaagaacctcaatgctaggcttgactatatttgatcccccaaacagaagagtcaggtaagactatatttgatcccgctaagcattactgataatagtgtattataagaatacttatggataaatttcagacaaagagaggaatagaacagcataaaaaaaatttgtataataataataataaccatatttgaggaatagaacagtatcaaccgagccttcatctgttcccttaagaattctaaatttctaatacttgttatatactttttatctctttattcatttactatgtttctcattctatcgcataattccactctttcaattctttgtgagttatataatataaattctttatattaaaatatgatcttattttaacttcatagcatgctgcattgtttttaggaaatagatataatcaatttatattacctcatccttgttaaaataagtcaattcaaacataagtaaaaaccaaatttccagaccttttttcatttctgtaacagaataggtccatttcatttagagtgtgtgcatgtcaatgaaccatacctaagatgaagcattgattaactaaaatagccaatgtttcaaacaacaaacataaaatttcaaacagcaatgagatccaggtaaacttcaaaatgttagacagatactaagatagataagtcaccctgtaaagaccctcattcttggtatctaaccccgcgcgatagcgcggggattcaatgaagaaaattgagtttggggtgtggcgctgatcgcgccagggttggcgctaatcgcgccacgtttttaattgtggccagaggttcggccaattcacgctaagggcgtggccttggcgctgatggcatggagtggtcgaggggttggcgcggatagcgccaaggaccgcgcgggtagcgccaaggaccgcgcgggtagcgccataaagtgcctggataattattttgatgcggcctactcacgctattagcgtgagttatggcgctactagcgtgaaaaggccgagaaggatggcgcggatggcgccagtttggcgcgggtagcgccactggactcgaaaggttcacgcggttagcgcgggatttggtgctgatagcgccgtatgtcgggcaggccgagtatatataggccaaaacgcgaaaatgagagaaaaaaagccattcatcttcttccttaggtccagaactccattgaagacctcccaagcttttaggaacatgatattctagcctaaacacctttctgagacttataaacttgattgaaccgattagaaagctaaaatccttcgtccttttctttgaaaaccccaatttaagtgagaagaggaacctcagagggaaaagctcagagaacttgagcttggcaaagaaccacagcttgattaagacatagaatctagaggaagctgttctgaagctgttggagtcgccactgaggtaagaaactcaagtttcaccgtttaattttgattctgggggtccctgtgaatagtgacccatatgagctggggctagaattagcccagggtccagttgagaaagttgttcagggcttagaatagatgaaggattagctttcagtttttgattctgataactttgaatcttggctctgtatatgcatgtgtgacggatgtagagtcacttgttgatggttctctgataggctagggccttgattgtgatgttctgagctgagaggctagtagagtagggctttgagtggacctcagcccttttctgatgacaattgaattgtgaggctgagtagagtttgggttatatatatatatatatatatatgtagtgagtctagaatgactcagatggattgtattccatcctgatggatcttgtgtggtctgtgaggagcctagtgcaggctgttttggcttgaaccctaggataggggatttctgctataatatgttctgagtgcatgtctgtggtctgattttgatatgtaattgcatatgccttggttaggccttgatactgagacttttggtggtgggagccacagacctggaaaggaagggcagactgagaccttaccaggtaagttcagtgttcctggggaattatttcccgtcttgtgtgccacaccacactccgggggagtggtggtcatttcatgatgcatgcattggtagttgcattctcataatgatatatgcatgcatctgtgcttgatttgtgatgtgatatgactgtgatagatctgttggccaatagatagatatggacctctctaggagatggttttcctcctagcatggctggctcttggtcgaggtagctcccaggggattgattcccacaggccaagggattagaagttgaggtagctccttctattctcggaggtaccatatgttgtgcatccatgcgaagggttagcacccaatgggatggcacaggtgcgagttccggactcccactgatataggcgttgaggtagctccgccaggcgttgaggcagctccgccatgtttgtatgctatgcttatgttgttatgagggccagagggccaggctagtgggccatttgtttgtgattgcctaatgtatgtattatgaaagtgggccagggtggaggagaagcctccatggaccctgagcttactgagatttgttatctcaccccgtgtggggaattatgcttttcaggtgactcttccgggcgaagagagcagtctcagggcaggaggcccgagtagagacgtttctgcttggctggtagcagaagatggagcttgtaggctcatttttggattgttttgcttatatttttgtaccctagagcagggatggtgtgtatatacaccagatgaggattgtatagttctgtataccctctgtgaggactgatattattttgtatcacacgatgaggtgtgagccttgatgtattgttgtacaggactatttatgatatgtatatgagacatgttctcctgagtactgcggttgtatattatatgaatctgcctaactctgttagttatctgtctttatgggttatgttatgataaactggatcagcaggggtgtgccttatgtgctttgtgtgtgacttttaggtgatttatgttattccatacataatgtatcaagaaaagcgattatgtgcttccgctgagttttataaactatgttttaagcgttaaactgatattattaatgataacacgtcggaggcctacggggtgttacacaccctcacctcaacaaactcccccaaggctgcccgtgcctgacctctcttcttccatgcctcaccagcttatggattaaattctatagcctaagaaatacaatgtggactacttataaatagatgagatacccaaagcataggtgtttaaaagaaaatcaagttcattcaagtcttcaatagcctatcaaaatatcagataatttcaatcaaacattgattagtcagaattcattatttaatttagcataattttttatattatgacacagccaaagctcatgacattaatacatttacagccattgaatgccctgcaacggttaaagcacaattagtgtcactatggtgaataagcacacgagaagatttagaacagaaagaagcaacaaaattttaatcaacaggattatttttagaagcacctgtgttcattttttggtgaataagcacgcgagaagattcacacaaagggtaagtaatatagtgatgataataataagctaaagttgttaaccttttgaagtttgagacctctggagtgatgcttggttcttccaagtagcatcaacagctttgtccaccatttgtacatactcatcatacccagctaagttaccaccaccagcatgctgcacaattactgttttaaaacaaaattatgtaaaaagcaagcaatgattttataaacctgtttaagatcttaaaatattcattataggccttctggaattttctatagctttaagttaattactcaacaccaaattatatcttaaaaaattgtttttttaagaacacaataacgcccttttttccttcccaagtcaaagtctggatcttctaggatcagttttccaaattccacctaaagtctttataatattaggaagtttttggcataagtgcagcggtaaaaaaacttgaacgatttgaacttgaggttggttgagtcttctaccctttcgaaacccttggtctacattaatcgctgaagaatatcaataaatagataaattaaacacatgaaattttggacaggtaactcgaaaaattaagaaagtaaaaagaattcgtaataaataataatgtatataataataataataataataataataataatacctaagaatttagaggactgaacctgcagatatgacggcgcggagtggaggtccctaacgtggctggagctgcaacaagagcgatcggagcaaaactcgctagaaacaaaagctgcaatattacatgcatcgtaaaagtcaaattgaatgttccaaagggtacatggtacatggataaaataaaaacacagtagcttcagacaattaaagaaataaaagaatctgacattcaacatgtccatgattcctgccattgggtctttctctttatccaaatttggctttagctgtaagataaacacaaaaattactacttaatcacattgattaacaataacatgcacatcaattttatatttaagcatctaaaataacaattaacatatacaattaactaaaaaatataaattaattgagataaaaagagtttacccactaacaaatcacaatggtaattttcagtcagaatttcaccaaaatccttgaaattaaatgcattaagaggtatcttaggcatatcatgttctataacaacaataccatccatgaatagtatcttgaatggatgattgcatactttatattgaccatcatttacaaccaccttagtgcactgtcaaaaagtagtgtcctcttctctctattaataatataagactaacaaaataacaaacaaaaaggaatgtcatgtttaaaaaatagaacatatattatgaacacccatatcaacataaatgaatataagggatttgaaaatttgtacctaaaaccaaacttgacaatgtatgagttagactaaaataataaccaaagaaaagagatttcatgtttaaaatatagaacatatttatgaacaccaataacaacatactaaatatttttcaaatccaaacttgtacctaaaacaaaacttgacattgtatttttcccataccaaatgaacctaacaaattaatcatataattaaaaaaagacaatttcagaaatgcttataattgaagaggaaacaaacctcatcatagtgagctgtaaaaaaaccactttaataaatatttgaagatggcttcttggtcgcagggtcgtcaccgtggcttgtagccttcacaatcgtgacctccatctccaacaccatgtttgctgagaatgttaaacggattcttaacttccattaaaaaaatgaaattttaactttttttaacactttaatttttctcagtcaattttacttaattattaaatttcttcataaaattagtaacttacctttgtgaaatagagtatacaggcaaatcaactcccacaaccataaatcaaaggtgagaaaaattgagcaacctttaattacaatgaacatagccatgaaaatagagaatgtaagtgtacaacatcaagcaaaaacaaatttataacaaaaaaacacatgacatatattggatgaaatcatgtgtccatataatttcattcatatcacaaaatcaaaatatcttaccttaatagcatatgactgcaacaatattaaagatgaaattgacaattgaaatgctctgtactactaacaaacatttaaattactattcacaaacatttaaatcactaccatattacctgcaagctgcaacacaatgcacataagaatggaccttcattgtgtctaacaaccctgcctccttgtcaaatctgaatcatagttatgcaaacaaccaaacatctacactccaatgtcaataacaaactaatattaaaataaaaaaattaaagacccaaataaattacaaaataatttattaaaatatcctctcttttttttcctagcattgtaaagcagaagaaaaccaaacagaaaatgctaacagaatcagttaagaatgtgagaaatgtagcttacagttgcgacctgatctctcaagatctccttatccttcttcttcttcttcctctgcttttctctctctctctctgcgcgtgtgtctctggttgtgtgcttgttttgggtggctgccaaatgcaaagaaagtccaaaatttacctcagcttatcaaatataaaacacaacaacttgaaaatttacatcaacgtctaacaattcctcagccactaaacagagagaaaaggcctaaaaaaatatgaaattttcatcaaaacggagataagagaaaaaaagaaaaacagaagaaaaacagagaaccggcggcttacggtgaggaagcgatggtaccgtgaggaagaaaaaaatgaaggtcacataggaagcggtggacaaaacggagataagaggaaaaaagaaaaacggaagaaaaacagagagccgacggcttatggtgaggaagcgatggtaccgtgaggaagaaaaacggagataagagaaaaaagaaaaagagaggaagagatggaagcggtggagcggaaggtagaagaaaagaaaaatgaagaaagaagtagtgctctccctcaccaccaccttgaattccatcgaaagaaaaaaaaaacagagagtcggcgggagagagaaagaagcgtgagaaaaaagagatgaggttgtttatgagggagaaggatggattgaaatttgaatttcaaattgagatattgagggagtaaaatgtggagagagaaaagagtgagaagatagtttgggttgtaattttcaaaattccaattttgtcaaagaagcaaggacaggtgtcaagatattaagtaaggctaaaaatggaatttcattagctttgatttttttaaatagatattagatagtttgagttatgtcatttatgtatttgagtcaaaatcgaaccgaaccgatcaaaatcattcatgtacttggtcatgagtttagatttatagatccattgacccgttgacccgatccacgaacttgtaataaaaatataaatttattatttatatatatatatattaaaattttaaaactaaaaaattattttgacaaaaaaggtgtggtatgtaaatgtttgggtcgaataaagggtctcataatcatctcatctcatctattttgtgaaggtgtggtactataaatgttacgcgtttaggtttctttttcttttgttcttgtgtgttctgtctcatctcatctccttctctgcgattctgcactagctcattctctgctctccctcatctcatctccttctctgcggttctgcactagctcattctttgttctctctcatctcatctcatcagattgataaaacatcaggttttcctctgcgctttctttttcttttctgaagctctttaacttctcatgatttttctggtttgtattcattgggattttgatagaaacagggatgagaagaaaagaaataaccttcattaattgttgagtgttgactcgaatttttgattataacaaagcttattgcaagaaattaatttgtaagaaatagttgtgattcagactattatagtaaattttattcaagaatcttttgttttaatttagattataagtctattttagaacattatgttgatggtattatataaatcatttttactattttcatacatttgataatattgtgttaattgtattgaatatttagaatcatgatataaaatagtagttctaagaaaaaaattaaatgagtaacctgttggcccgaaccaaccgaaccgaaccattcatgaacgagttgggttaagttgggtttcaattttttttcttctaaaaatcgaaccaaaccaaacagatcgaatttgattgagttggatcctaaatttggtctaaactatgggtgttccatggtatgggtcacccaagaatctgaattgatccaaaagtttgggttgggtcatttatgtatttggatcaaaatcgaaccgaaccgatcaataacagtcatgtacaggttgggtcacgggtttagatttatagacccgttgacccgatccttgaacgtgtaataaaaatataacttttattatttatatatatatatatatattaaaatttaaaaactaaaaaaatattttgacaataaaaaaaagtgtggtactgtaaatgtctgggccgaatgaagggtcagcccataatcatctcatcccatctcatctttgctgtgaaggtgtggtactgtaaatgtcacggatttaggtttaggtttctttttcttttgcgcttctgtgttctctctcatctcattctctaagtttttgccgctttagttctctctcatctcatttcatcagattgatcacacatcaggttttttctctgcgcttgctttttcttttttgaatctctttaacttctcatgattattctggtttgtattcattgggatttcgatggaaacatggatgaaaagaaaataaataacctttattgttgagtgttgactcgaatttttgttgttgtatttgatttactattttctttttcttgtttactttagaattaagttaatctttggtaaaatcttaagaggaaaaatgtgtctatttggattaaagattgagagaattagtttcagagtgagggatagtcagagcttgattttttttctctcgttggttgatttattctttgagagtttaatttaaactagtcggtaacctgtgcattcgcacgggatataccgatttgttgtgttttgttttgctttaaattgaaaaactatttttataataagtaaacatataaatattttagaaattaagaaaatgaatttacaataggagtaagaaattatgtttgttgtgtgtaatataaagatatgacaattataagtaaacacacgaatgaaaattctaatacttatttgtgtgtatcttttgtcttcgattgtgtctgttagcattccttttgcatgtgtaataaagaaagattatttaataacaatagtatatagatgtagtgtaatataattgtaggcacatgaggatgaatttttaatgtagtactccttaacaattttgttaatatcttacaaaattctagcctagaaataaaatattgtctataaatttaactgatgggtcacaacaatttcaaaaagattaaaaatttaagtaatttgagtggaatatgactaatatatggttgattgagaacctattagaatttcaattcatataatcactataagataaagatataagattgacagaaaaaattaaaaaaattagcttgaaaaagaaatactaatttttaatctaagtaagaattgtaatatgtagcaaacaacttttagttatgaacttaaattaaagaaaacaactaaaaactttaaacaaaattaatgttatgctagtaaactttccacttttttaagtcttctctttcaatttacccaaataataccttcatttccttccatttgtcttgcatcttttctccactttgaaccttcatcttctacttaatcatcaactggattacttttattcacttctgtttgtgtcaatgctcacttttatagaggtcctacatcaaatttcacaattaaacattccattgatcctttacccgttcacctaaatttctacaatagacatcagtttccatttactaactttttttaaacaaatataattgaactattgattataaataggagtaatattaacaaaagataagcaacaacaaccaaacattgtatgtaaaaaattcctactctataagataataccaaactaacggaatcaactgaaaagttcccatgtgaaaagttgtctcaaaagtgtcataaatttagaagtaaaatgagaaataaggaaacatatccaaaaatgtcattttgacatttgatcaaacacataatttgcaaccaataaatcagtctagaataaaatcaaataaatatttaaaaaaattctccaattctcatctattcttataaagactagtttaatatatttttccacaaaatactttaacccataggccatatcaaataaacatttttaacaaatttagtccatattcacaatattaaagaaattttgatgaaggagaaaaatcaaagaaagtaattaggtcaaaccaaaatcaaccaagaaaatagaaactaagaaaattgttcacatttgttactacatattactataaatcatgaaaaaattatgaagaagttgtagtcacagcgaccggcaaagtcattttcagcgagggttacgatgttgaatggttaacggagaaataaaaagatatttcactggtttatttttagaagagagagaaagtaaattgagtggatgaaaaaggtaagataagagagaaaaatggtgagaaaacagagaacatcaaagaagaagaatgtttcaaagttgagaaaagagagaagatgataagaaagatatttaaacacacataactcttgaaaaggtagttaagacaacatattatctagactggaaagatatttaaaaaattgcatggtctagtatagtttattaatgacaaaatggatgtgcaacaaaaataagagaaagaaagaagtgaagttcaataataattttttcttgtgataatatatctatgttgaaatgaggccaaacgaaattgatccacttaaggttttatctttgtgcaaacttgccaataattagacttagccaattgagatgagaaccaacaacattggaaaatatgaagggcccaaaggagaaaattgtgaaaatcataacataaaatgaaaggagaccactgcactctagacaattgtcaagtaaattaataagagaaaaaaagaagtggagttcaataataatttattcttgtgataatacacctctgttgaaatcaaatcgtaaacaatggatccacttaggactccatctcttattacacctgtgcaaacatgtcaataattacactaagtcaattgagatgagaaccaacaatattgagaaatatgaaggactcaaagtaggagattatgaaaataataacataaaatgaaaggaaatcactgcacttttctatacagttgttaaataaataagagaggaattactatatcactagtggtttagagttttttgaaaggaaaaattaaaataatattgagattttgtatttttgtaactggctagtacaactgactaagtgttaaagagataacgtgtgagaggtatgaaagaaatatagatattttttatcaaaaaggggatgcacttagcaagttctaatttgaaaatattggaatgtacttataaaaaggatgtgcaattagcaaattaatattcaattaccattttgcccccattttttgccaagtgtcataaacataggatgtccaattttgtaattttgctagcagttagtttttatatatgtataatagatgatgtcttttatttttcttttgttcttttaacattctttgaaagtttgatttgaatggtgtcttttttttttcttttgttcttttaacattaaggttagttaaaaatcattgttcaacgaggccaaaataatattattactttttttgttaatgattgaaataatgtctataataacctggtttttttttcaaaaaaaaaaaaaaatcccatgctaacagcgtgggaacggcgcggttagcgtgggatgcggcgccagtagcgtgggatatggcgccagtagcgtgaaattgcaccagaaggccatttcttgcggcctgatggcgcggatagcgccagtttggcgcgattagcgccatatatgtccaggaagcttttagttgcgctaatttggcgcgaatagcgccatatatggtacgattagcgcgggaacgtcggcagaaccagtattcaaaggccattttacgagattttggccccaaaaatcatggtttcttcttccccacgccctaacctctattagagacttgcccaagcttccttagacccctttttcttggcctaaacacctctctaagacctttgagtgtgagaggaacctttgggaaagcttaatccttcatttctgctcttgaaaaaccccttttgagtgagaggtggaatctgagaggagaaactcagagaacttgagtcttggcgaggacccacggcttgagaaggacactaaagctcgaggaggctgtcctggggtcttctgagtcatcactgaggtaagagactcaagtttctccgtttgattttgattctgggggtttccatgaatagtgacccatataagttggggctagaattagcccagggtcctgtagagaaatttgtagagagcgatgaatagatgaaggattagctttcagtttatgatttagataacattgaaatttggctctgtgacctgtatgtgaggcctttatgataaatcatttgtggaattgaggccattccagagccttgattatgcctgttatgagcctgtgtggctaatggaatggtgccttgagcgaggcttggaccattccagtggtattttgtataatgaggctgatgagggactatgccatgcttatgtttgcattgagtctgagatgactcagatgcttggtattcagcttgatagaccttgtatggtctgtgtacagcctggtgtgggctgagtttgattgaaccctaggataggggaattctgtatatgatatgttctgtgctggaatgcttgttggcttgattttgatatgaaattgtatatgccttgattaggccctgattgtgagattgttggtggcgggagccacagagtagggaaaagcatacagaacgagaccttgccaggtaagttcagtgtccctggggatgaattcccgcatggttgcacactacactccgggggagtgatggtcatgattcatgatgcatgcatttggttgttgcattaattaaagtgatatgcatgtacttgagattgattatgctattatctgggcgttgagggttctccgaaatatgttctgggcattgaggggtctctgccctgtgacttaagcgttgagggttctccgctaggcattgagggttctctgccatgtgatttaggcgttgatgagatccgccaagcgttgatgagatccgccatgtttgtatgatggatatgttgctatgagggccagtgggccatttggttgtgtgattgccttgtgtgtgcattgtggatagtgggccaggatgggaatgatttcccatggaccctgagcttactgagatgtgtatctcatcccgtgtggagatttatgatttcaggtgactcttctggacaaagagagcagtctcagggtaggaggcccgagtaaagacgcttctgcttgattgataagcagcagatggagcttgaaggctcatatttgttttgattatttttttgtacccttgataagggatggtgtatgtgtacacctgatacatgtatagttctgtataccctcgatgagggcggatattcttttgtatcaccacgatgtggtgtggactgtgatgtatatatattgtactgaactatttatgatatatatatgagactctttcctgagtatttttgttgtataattggttatctgcctgtatgttcaagttatctgtctttatgatgtatgatatgaaaagaaactggatcaacaggggtgtgaaatatagactttgtgtgtgtattcaatgagttatgtttatttcatacataatgaattaagaaaacgattatgtgcttccgctgagtttttaaaatcatattttaagcgctaaactgatattattaatgataacacgtcggaggcttacggggtgttacaatgtcatttcatcataaaagcaaaaatattatatttgtataaaatatcaattaatttttgggctaacggggttctgtttaaattcttagagttgtttggtcttaatttaagtactactaatattggatatccaagtgttgaaattgcaagtgataaaatttctcaatgtattactttcaggtatattgttatttgtttcttttttttttcatattttgtttacaatgtttataatattaaattattaatgaatcatattttgttcatttgtttgttttagtaaatctggttgtaacaaatttggttatagcaaagtttattgcaagaaattaatttgtgagaaatagttgtgattcagacaattatagtaaatcttgttcaaaaatcttttgttttaatttatattataagtctattttagaacattatgttcatggtattaaatgaatcaattttactactttcatatatttgataatattgtattaattgcattgaatatttggaagaatcatgatattaaatagtagttctaagaaaaaaaatttaaataaataactcgttggtccgaattgaaccgtttatgaacgggttaggttgtgttgagtttcaattttttttttgaaaatcgaactaagccaatcaaatttgattaagttggattctaaatttaacaaaaaccgatccaaactgatacacgaatacctctaatcaaaatcgatccaaagggatccacttacctcacaaatcccacaagcccaagtcttgccaaccttcgaaaacgacgcactctcaccaaacaaaccacaaaaaagaaaaaaaacacaaaaccaaataaaaaaaaagaagaaaagaaaaccctagttgttcccttccaacaagttaacaaccacttatttccaaaaaggaaaagggtttttcagtttttttcccttacacccttcacactatcccctttcaccacaaaaccctaaaccctcattctccaatccaattcaacccctcccatcccatgttctccttctccttgcaccccaattcagcatctcttccgatgtgacgccgcaagaactcagagcacggccacttgttccctaagaaaaagaagtagttgaagcgctgtgattcgtttgattttaagggtagcgactagctagtgagaatggaagcgcgtgtggggatggtggtggaagggggccagagaaccctcaacaccgacaacggtggtgccgcgaaattcctggtggcgcagaacaaccaccagctcgggacggttcaccagcttctggccggcggcatctccggcgcgtttagcaaaacctgcactgctccccttgcgcgcctcactatcctctttcaggtttattattttgttttaattgattaattagttgtttgaaaatgtttttgttttattttgttttaaatctgttgtgaactaccaacaacggttgacacaagctttgtgtcccttgataaaatggtcctggttcgaatcctgactttggatatggaataaactgtgttgggagaggaatatttatcttgtgtgcacttgtgtacgttcacggtttccgacaaaaattagtcacggcttacagcagggctactttgtatcaataccatggtcagcaacaaaaatctgttgtgaacttgtttggaatgtgttttttgatccgtgtggtatttgtgggtttcggctgagctggtgaagcggatttttgttttcagggttattgcattcatgtttgagcttacaaatacaattgactacagttgacttttagacggttaggtgtctgctgttaatttttcataatgacaattaacagaaggacccaattgaaaaaaaaaagttcaggacccaattaaaaaaattcagggacctaattcaaataatggtaaaagtaggggatcagttcaatttaaccaaggaagattgaactcagaaaacacatttattagtcatagcaatcagttttgacaaatgagatgccaaccgaagaagaacccgaagaaccctcacactagcaccactgttttggcggtgattgcagctattatttgaaaatgcatcactattcaaaactttgttgcagcctctccgtactgcaacattgcactattgttaattatgaaaaataaatactaaacgtgctcctagtgtgtgtatgtatacatacatattgtatgtttgtatactcctcttcctgcttcagttttcctgttgtatcccctatggccctatccatgttatgttctttcattgcactgcattttgatgtttaaaattatgtaataaattaaaatgatttgttggtatatatgggtggtacttggtacttgatgtcatggtgattatgatgatgccataggtgatcattattgcataaatctatctttgtactttttttgaatgacatttgatcttgaagttttagttgattggttttgtatagatccatcattccttttgttgattcaaaagcaatttttttaactggtatttatctgactattctacatgtcttatctttaacaggtgcaaggtatgcattctgatgtggcagcattgagcaaccctagcatattgcgtgaggcatcacgcattatcaacgaagaagggtttagagcattttggaaaggcaatatggtgactattgctcatcgtctcccatatactgcagtcaacttctatgcctatgaacgctacaagaatgtaatctttggtgttctttctatactgtaagtgtttaagaagtcatggcagctattactatgtaacttgaattaattgcttctactctattgggttgcaggtattacattcactgatgggggagaatgttactggaaattcaagtgcaaacctccttgtccattttgtgggtggtggtttgtctggtataacatctgcgtctgccacctatcctttggatcttgtgagaacacgacttgcagcacaggtaactagaaatttttgagttgagaatcatgagagagatacttctcaagcctttagcaaatgcatgagtgacttggctgtattttacattgtgttcattgtttgcttgagttgaattccattcatcatgattttctgtttactttttaccttgtatgctgaggcttatattttgttgctttgcagagaagtactatgtattacaggggcatctcacatgctttcagtaccatctgtagagatgaaggtttcttgggtctgtataagggacttggagcaacattgttggtatgttcacaatgcattttcacttttttatctttatcttcctatgttcttattattgacattagtcatacctaatccttttgtatgttgcagggtgttgggcccaatatagctattagttttgctgtttatgagtggttacgctctgtatggcagtcacaaaggtgaatttctttacttgtgcaaaatttaggaatagtttatcctgaatgttatcttatgctcattgctcactaaatatggttttgaaaataatacttttctatttctttcaattgtaggcctgatgattctaaagctgtggttggtcttgcttgtggcagcctttcaggaattgcatcctcaacaggtgggtgcttcttgattatggctatctctaatctgagtaattgagcataaattcctcaagttttcatttacaatattccatgtccaatgccagctatgatattacctgtatttatatttgttactcatttaattgcttttggcccatcttgtaaatatgatttctgttgtgaagctgggaaattggcaagcatttatatgaatgtcaaattggttgggtgggaagtggattggtgtaagaaatcgaaaattctgcttaagtggtgttactttctgcttttgaaaaaacattaacgtcaatccctaattcaaatctaatcattgctcctttattaggataaattaaatcgttgatgtcaaaggtaatcctactaaaagaaactgttaaagcattataaatcaacattgcacaataacatagttacaatctagtgaaacttcacccatctcaataggcgaaaactaattaaaatttgaaattgctatcactcttgaaatacttgaaagtgcaggcccatttattgtcccagtcataattaaacgattggggtgtaatcattttgcaagatttgttgcaaatagcagttcagttacctgtctttagtgcctaacagagcatctagttaattatattatatgcctgaatttctttttctttcagcactataacatgtaattggtaaaaactatttttctgtggaatagtttctgttgaaagttgtaattctagtggcatgatgtgaccagccctgtggtgtaagctaacttgcatgaatattagttataactagtgcaagaactgatttcattgaaagaatctatactagtgtgtagtaatgcctttacttgattgcgttttccaagtaaaaagtcattttcatcaaactagttagataaagatagtattattctactttttggcatggttttttttctgggcatcacctaagtttgtatttaatgtctcttgcaacatgcagcaacatttcctttggatcttgtaaggcgtagaatgcagttagaaggtgctagcggtcgagctcgggtctataacactggcttgtttggggcatttgggcgcataattcaaactgaaggggtacgaggtttgtacagaggaattctgccggagtactacaaggttgttccaggcgtgggcattgtctttatgacttacgaaacattgaagatgcttctatcaagcatttcaagttattagcatactcaattgccaaatgtgcgccatttatgacgcttgtgggttaagttaattgaaaagtacaatttcaggggattttgatctcttagaaaatggtattctagaaaatgtcatggttaacattttctaggaagtttttttgcggtgatttttgcttttattgccagcatttttgttctgtataggtataatttgagtgacagcaactgtaccaacttcgaatattaggttgaaaccattctgtagttgatgattttgtcaacaaagcagttttgttttaatggtacaattttctttttttttattaaatagaaaaatcaaaattattttttggataaatatttattttgatctttgaaagtgtgtggtgttgacagtttggtcgttgaaagttgaaaaactcaaatttagttcagttgatagctcactttgttaatcttaaagtatgtacctatgtagcacatctggtgatgttatagtagttgatgtttgtcacatgtattcaaatgattatcacatgtcatttgtgtttaaaatttgactttttaatttagtttttaaatttacaatttgttgtcattttagtcttgaacttagctcactctattagatgcttgatttttttactttgatcatcaatcatggggaaaatgattgcatgaatcctatgtcaccccttccatttacacctcattcatccaccaaagggtcatgtctactcaagtcctctaatactcaactcttgaataattatgtgaaaattgcaaagactgaaaaaaaataaggacaagatgtattacacttatttcattgaaagaatatgtaagtaaatgattctaagagtatcatttttcttccttttgtgattctcaagttttttaaaactattttttcgtggttaatgacttaatgttattctataaaataaattaattaaataattaatctagcattctacacataatatataagataataccttatatttggatagaagttttgaatcttatataatcttgctaccaatgtcttggatttagtcataaactattgctatgtaattattcataaatttgtttaatatttatagtataatttaaatgacgaaattggtaagagaaatgtaaaaaatataagggataaagaatgaaagtgaggaaatggtaatatacatatgctaataatttacatgcaacatgagacttaattgaaaatttaaagtgcttttaggaatcaaaatgagaataaattcatggaccaaattattagtaagtgattaaatttaggaattaaaatgacaataaattgtcaagttcaaagttaggaagtcatcttttagacatgtgacaatcatgtgaatgatacttgataactctaaggtgccacgtaggcccaaatattaaggttatataatattattataattgagatttttatattaaattaatttgaatctaatttatagtttatataattttgactttaagtttactaataatatattaaatatattttcattataaactaatttatgataaaaatcacaaatatcattcatagaaaataattatgtttgagatcatcatgaacgataaagttctctatgagtatttcacacaagtgaccaacaatgtaacaccccgtaggcctccgacgtgttatcattaataatatcagattagcgtatgaaatagcaaatatatagttcagcggaaacacaggatcgttttcttgatacattatgtatggaatataaatctaacagataacacacacctatacagaaacataaaccacgtccctgctgatccagttcatcaaaatatcataataagacagataacagatctttaggcagagtaataacaaataaaacatacacatgtactcagggaaattatcatatacatatcatcaaagttctgtacagacatatacatcagagtccacaccacacatgccgtggtgctacaaaagaatatcagccctccatgagggcatacagaaccatatatcaaaacaaaacaaaatagagccttcaagctctccacgccgcttctccatcaagcagcctagtctcaactgggcctcctgccctgggactgatcttctcgtcctgatatattacctgaaatcatataagccccacccggggtgagataacctatctcagtaagctcagggtcctcgggaaatcatccccaccctggcccacagattcacagcacaccaaccggtatatgcatcatacatggccctctggcctcatcatatcaaatcaaatcataatctcaatcacatgacaggtggcagagatcctcaatgcctggcggagatcctcaacgccactgacggagatcctcaacgtcagacctgtcatggtgtggcagagatcctcgatgccactgggcggagatcctcaacgcccatgatacacggcggagatcctcaacgcctgtatctatctattggccaacagatatctcaaacacagcacaaatcaaatgcagatgcataatctcaatacaaacaatgtcacagccaatgcatgcatcatgaatcatgaccaacaccccccaggagtgtggtgtgcaaccaaaacgggaattcattccccagaaacactgaacttacctgggacaatatcaccctgtggtctagtccctgctctgtggctcccgccaccaataagctcagaatcaacgcctatacaaggcatacatagctcatatcaatatacagaccacaggcatcaatcacagcacataaccacataagtcctctgtcctagggtttaaccatttcagcctagcacacactaggccataatatcataacatgaaggctataacatggcagaaaccatcagcctcctcacattcgaaaccacaggaatggcctaacctctatccaggtgccattcaactagcctcataggctcataacagacatagtctaagctctggaatggcctctacactaaggtagatacaacacacaggccacacagacaaatcccagagccaaaatccaaagtcatcagaatcaaaaactgaaagctaatccttcatctaatctaggccctgatcaactttctcaactggaccctgggcttattctagccccagctcatatgggtcactattcacagggacccccagaatcaaaatcaaacggtgaaacttgcgtttcttacctcagtggcgactccaatcacctcaggacggctttcctaagctcctgtgtcccaatcacgcagtggttctgcgccaagctcgagttctccgagcttttccctctgaggttcctcttctcactcaatctgggattttcaaagaaattgatgaaggattcaagctttctattcggttcaatcaagtttctaaggctcagggaagtgtttaggctgagaatcaagtcctaaggagctttagaacttcaacaatggaggttggggccaagggaggaagaagaaatggaaatatcctccatttctcacgttttggcctttaaaaactggtctgccgacgttctcacgcgactcacttgacctcccacgcgactcgcgccatctcttcgggccttccacgcgactcgcgtggatcccaagtgactcgcgtggagttccagtgaaaaaccatgctttctggaccacttcccacgcgactcacgtggatcttcacgcgactcgcgtggcacggcaaaaccatctgccctgtataacacatatggcgcgtgtcgcgccacccttcaagtgggtcgcgccatatgccagaacagccataaaacttgcatttttaagcacctttcaccggctttctaacctgaatccccgcgctatcgcgcggggttaagcgccgaaaagaaaaaaaaataagggtccttacaaacaacacttgacacaactagtagcaatttgtgtcccttaacaagtagtctaggtttgaatcctggttagtccttgggtatagaataaatcgtgttgggaggaaaaatactcaccttgtgtgtgcttaagatccccaatgaagatttgccaatgttttcggtggggacaacttcataccaatatcatggttacaaaaaagagtatttcacacaagtgcatgtcttattccatttaatgacatctaaaattagttttaattttaaaattagacaaaaatgtttacaaacatattattctaaagtagtaaccatttttattgcataaaaagaatgggaatggaacaaatatatcgaaccccaaacacagacgaaggtgcgtacaaaattttatttccaacatatatcaagggtggggatgagagtggggacgaagatggggaacaaaatattcatccccgctttactccattgtcatgcatattcacaatcaccatttatacatgtttttggtcttaaataattacaaatttggatactgttgaaaaaaacacacttatatctttattacttaaaaatacacaaccaagaacaagagataacactataaacgaaatagaaaataatcacgaatttgtttaagtttggaccctcacttctacatccacaacctcaacctcaatttgtttaacgtggttcgaactgtaatgcctcttaatactctctcgtgcctgattggttttaattaaaaacttgtgtccactttgtgtgaaaatgatcttagttgtaacttttccacgaaaattctttttgcgtagcttgttttgtgattcgttaatggcgtaaatgattttcctcaccacggatcataaaataagaatacagtccatgatacagttcaaatacagtatccaaaataatatacagacaacttatcacaaattacatgccacaacaaattacaaatcacagcatacagcttcttaacaaaacttcttcaacaatcttcttctacagatcatgctttcctgtttctctgctcgcccaaataaattgggttcatcacaggtgtcaaccacagacacaactcgggtgagtttatgacaaacatagtttgaataatacacatatagatatataggcacagatagataaagtcttaattataaaagaccacacaacttatacaataacaaatcatcctatgtatacccaattttgtgatgcatgtttatcttcttatatgatgcatgactgagatctcagcttctcataaaatcatcattagtggccacagtcagatagcaccaccctctccagtggaacacatacctatccaatcagtcggggtagggcaggggcgagtaggaatgtcacctccacctatgtgatcatcatggtggtgtggtcctccctgaaacacactaccccccagttcaatctctgaacgcatggactcggttaagctatctgacaactccacggtttagcccccgctaggcataactccacggattaacccccgccaagcatatgcatatgtaaatgcatgaatgatccattttatcaagtcttcaacatttttacaacccataaggcttatcacataaaactttatcataactcaacatcaagtgaataatagactatcatacaacaatatcaacagataaattacgatacagtaacttaattaaatacaacaaccgaataaaacatacagcaatatgcagccacgtaatatcatacagaaatcattaaatacagcacaacaacattacttacagcatacagcaacctattagatcataaagtatacagcagcatacagtaacctattattatacaacaacattaaatacaataacctaattaaatatacaacaacatacaacaacatggtatcttacagcaacattaaatacaacaaccaaataaaatatacagcaaccaaataaaatatacagcaacagatacaacaacaacataataaactaacttccagcaacagcatacagcatcatcaaattaaatacatacaacaacattaaatttttaattacaaataccacaacatccaataagtagtaaaggaatacaaacaagtaacctatggccacaaagtagaattatttattttggacagccacttatttaagttcaacttaattattatttaggttatcaaagattaggtttaaatactatcctagttcattgagaactttaatcaaacacttggtatgccttaactttaagccttagtaaataagcaaaaacagaactttaattcatgaaattaggttcaagctatttagctattaattatttattaaactagaatcaagttacttggctaaacaattattcaaactctgagacattttatcgaacagtttgtctacaaagcaaaataaaaaaaatcaaaggttattattcaaactaagttcaacataaactccccatacctcattttcctaagcttttggacagccccttgctcctaatgatttgtggacaacttatcttctttgaatttgaggattccttgcttctaaagtggccaatcttcacgtgaaccttcaagcatttaggccttggtttttgcttctaggtaaaaggtggtttagaaagaaataaaaatggaaggctttgggatatattgtgcacggcctaagctctaagagagcttctaaattctggtcctacatcccttttatagggtgattaaagcttaaaatatcaagggtgatgattactaactttccatgtggttagtttcctattggctagccattccttgatttccaagtggctaatttcttgcaacttctctaggcttctttacctcctttgcacgtatacttctcccccttggacagcccttaattcggtttctctcaattgtgaaggcaaatatcttccttaaaccattattgctaactttcacatgtttccttcctattggctaatgttcctttgctttacaagtgtcttgtttcttgattattctccacttttccttggctgtcttgttttgcacgtgcactagcccttccaaggtgtatttcctttggtttcttcctttcacgtgagatagcttaggcttagtcccaattttttttttcaaaacccgagttagtaaaacagaagttatggattcattaaccgttggatcttcttaaaagtttaaaggtgtattcctaacccttatatctaacttttgaccgttgggattgtggaaataatgtttctatctgtccacgtatttagctaaatgagacaacataaaatttacttaaaatatctcttaagtcatttatgactagttttccacttggaccaatagcaagttcctaagcctcttaaacatccatgtgttcattctttgaagtttcttagagcttttctccattgatcttgcatcatactgtcaaagcttgtattaggaattctaatcaaccaatttttccttcaattacatgtaatagcttttcttgaattcttattggtctgttttgctttgaattattaaaattgccaatctaacttatttagagcacttatccctgtcataattaagggaaaattctatagatcctgtccatactggtcttataattttctgatgcctagggtagtctaaattaagctcttttcattctatcttccaaaattcgtagaaattttattttaaggttttctgtcaccaacctcactgatactgagttttctaaaagtattttatccaatggtgaagttcccacaaatttctaaagtcatctggtcagtttttgacctaagagcattttggtaattttacccctcaccctaggggtataattgttatttccaaaaatttgttcagaacatctctgtaattgtcaccctaagggtatctttggttatttctaacccatctgagaatatttataacatttcttccttaaatgtcttaccggacttcctagggcaatttggtcattaataaaatatccaggggtattttggtcatttagtgccttagggacctatctgtcatttttgaaattgttcaaggatattttggtaatttctcctagggatacattggtcattttcagaattattcagggcaaaattatcatttccatcctagggacataaacgtcatttctgaaattgttcaggggcgttcttgtcattttgccctaaattttttctaccgcctttcattaacattttactcttagtaattgtctataattctctaatttttttggggtgttacacgaacccttatccctacatcaacgatctcctcacaacaagtgtttaggacaagctggacaaacttgtaaatgttccctcaatgtgacctccctctctcaattaggatggtgaccccctctccaggttggataattcttctcatcttaagaatctttatatataacctagcatcataatcttaaaagaggaaaacaaatctctaatttacagaatatatctttaattctaaatagcatcctagaaataaaacaatatttttttgaaatataaacaatatcctagaaatttgaaattacaaatttgaactgttttccagcaaatacgattaaaatatcttttagtcttttacttattttatctttttggttttaattctattaagtggaatggggacgaggaatgacatgtttgtccccaccttcacaacaagtttttaggacaagctgaacaaacttgtaaatctttcctcaatgtgacctccctctctcacctaggatggtgaccccctctccaggttggataattcttcttatcttaagaatctttatatataacccagtatcataatcttaaaagaggaacacaaatctctaatttacagaatatatctttaattctaaagagcatcctagaaataagacaatatttttttaaatataaacaatatcctagaaatttgaaattacaaatttgaactgttttccaacaaatacaattaaaatatcttttagtcttttacttattttatttttttggttttaattctattgaatggaaggaggatgaggactgacatgttcgtccccaccttgtcctgttgtcatgcttatacacaatcatcatttatacattttttttgttttaaataattatgaatttgaataagattaaaataccttttagtctttgattattttaatttttggttttaatatttcatgctaaattaaaaataattctttgatccattcacatatctttattagatcaatttatcatataacattatattattatatacaaaacattgattcctttaaacattaattcctttaatagcgatgacattaataaattaaatatgtatttagttatttatttgtcaaaaaaacatgtgaagacagttgagtcaagcacaagtatcatgctagtttaattaaaaattgtgtaataaagcctgaaaaaagccttaaaaatataaaataggaagatgtaatcatcttataatcaaggattaaatgtatttttgttctttaaaatatttgatttttgcgtttatttcataataaatttttgttttgcgttaatttgctagtaaaacaattttatttttggtccttgacactttttttagtctctgataacttaaaaaattttgtgtttattttttgataaaaaaatcatttgtaattagtcgagactaaaatactattcactaatttattcagggaataaacacaaaattcgctaatttataaaagattaaaacaaaatataaaggatcaataaaaaaattgttgttttaagtggtagatcttgagcaaagatcttgaactcaagatctgatcttcactagatctctcaataaaggaggtgaagaggtctccaacatggagaatgagttcttgtaaaagaaccctcaagatctgtacattgttcaaaaaagaataatttttttcctctttctctttccctaagatcttaaaatgagatctaccactaaagaaaaaattagagagactgttagactttttggcaagcgtaccaattgtcgttgtaagttacaaaatttataaaagttcgtctccacagggacttgatttttactcagttaattcaaattaagttttaacagtttaatagtttatatacaatgagtttgaacgaagttgcatgtgattgtagattactagaaattacgtaaattcaaaagcaacggaaatgaaacattacaaatgattactgaaaataaaacgagtttgattaattaaagagcgcaggattggatttcatcgttcatacccttagtattcaattaatattaacatgcataagttattttctattattattgatgcacacataaaatcaccccaaatcgatgtctcgcatttgagaatcctaagaatatttatcaaatatcgatttctcgcatatgaaataaatatcccagcgttactattatattcgcgtgtttatttgcaatctaaacgttatgatctatgtctagcatgttcacagaggacaaggagattataactttgacatacatggtgttacatataatcggtctttgtgagcttgggaattcccctcaaacaacagggcgtggggtgctgaaaggcacaacaaggcctaaagttggtgctaacatcaacttgggatgctgatgtgttgcaaacacatcttgtttttaatctagttttaggatagaatttaattaaataattaggaaaattagttagatttggttaaagttttaatagttattatttttatactgatcaatgccatttaaatatatttcaggataatacagaggaaaataagcaaaagaaggaagaaaactcagtctggagtctcgcgcagatcgcgccggaaacaacgcgggtcgcgccaagtgcagggatggagaacaaactctcgaaggatccacgctactagcatggaatccacgcggttagcgtggaaggacaaaatgattggcgcgagtagcaccatatccacgcgagtcgcgtcagtacctcaaggattaaggattttctcctctgtcaaccagcgcgagtagcgccatatccaagcgagtcgcgccagaacttcaaagataaagcatgtttctttctgccaagccacgcgggtagcgccatacgtcacgcgaccagcgccatcctttctgccaactcgcgctagcagcgcggattgcgcgcggctcgcgtgggatcgattttctttcctgttttaaaagataggtttcgaaaattagtttatcttttggttttcttaccttaattaaaaagtattgtaaataggaaacctctaaacacgttggggtacatacattgagaaacatagtcttagctttagaattacacaaaccttcattgaaaaccctaggaatcaagcttcaaagcaaaaactctgcacaacaatgtcctattcatctgctttgtattgtgggaaggccatgaacttatgagtcaacctctgtaatgtgactggtattgaatacatatgttatgtttattttaattcttttctgtgctgataatttatcttatttagaattgatcaatctatataagtactgagagttatgattcgcaatgggaacgttggggttgtaatctctgacttgttaagaataacacttgttcttcacctaggaatagggatgcatgagtgcggagctatgctatgatctttgaatgtttaaattgataggtttcactaaggaattaggttatcaattcagtttaaaaggattaatccactaagacattaggggttaattaatataggaaagacttattctccgagtaaatataacacgaacccataagatttattctctgaattcttagtttgacagaatcgctagaagggtagggttcttgatcgaattaaaggggaaattgctagttatctagtatttacaactataggagagatttatcttatgtaaacttaaagataacaaaatcagtcaagttaaggtggtgatacttataaggaattgagcctgaccacaattatcattacattggtaacatttaaatcaattttactgttttactttaatttctgtgttagtcaacgaaatcactcaacaacactattttgcgagattttctgttttctatttcaatcacaactatttaaattgctgtaaaattactccaatccctgtggagacgataactcacttactttattacttgtaacgatcggtgcacttgccgaaatcgcacaacaagtttttggcgccgttgccggggattggtaacggatttcacagtaatcttaattttgagattgaaactttttgttactaatcgcttctctaagtttttatgcgaagttcagttagctctgaggagttggaattcgacccagaaattgagagaacactccaacggaggctagctagacaaaagaggagagaagctgaacaattcgactttgattcacttccagaatttgagtcggaagaagaaatggctgaagaacaacccaatcagccaagactgcgaccagaagatgaactaatggaggatattctggctcctgtgttcacaagacccaactccagcattgtgagaccaccaatccaagctaatcacttcgatataaacccttcattgatagcattggtggaacgcagtcagtttggaggagatgattcggaagacccacatgattttatagacagattccttagaatctgtgataccattagacatcaaggagtctccgatgacgctgtaaggttgagtctatttccgtttgctgtaaaaggacatgctttaaggtggctgaaccgtcagacatctaatagcattgcaacttgggaggatttagtctcaagatttttcgcagagtacttttccatggataagtagaaccgtttggtgaatgaaatcaccaatttcacacaaaatggaaaagagtctctttgcgctgcttggaaccgattccaagaattgatcaggagatgtccacagtatgatatgcctgtaggtaagcaggtaaggatatttttcaatggcatgactcctgagacacgtatgatagtgaatgttgcagctggtggaaccataaggtccaagaccgccgcacaaacgtatgagctgatcaactctttggcccggaatgaaaacgaaagtatgacacaccagccaaagaaagaaccaattcaactttccactaatgatgcaatgcttgcggaacaaaagattttggcacatcaactagccaaattaaccgagaagattgatagactgcaagtttctgcagcacaagtggcagtgaatcaaccacgcacagtatgtgagtattgccaaggtgagcacgagtctaatacttgtcctattttagttggtgctgaccctgtgcaggtaaacggtgtttggaacgatcaaagaccgcagcaacaaccataccagcagcaaccataccaaagaaacaataattatgcagctgggaacaactatcaaagaagatttcaagggggtggtttggattacaaatccaataactacttgcaacctcctcctatcccaaacaaggaaccttctgagcttgagaaagtagtgatgcaattgtccaaaaccacagcagatttcattgcggaaacaagggctcaccggactaatcaagatgcttccattagaaatttggaaaaccaaattggccaacttgcaaaacaaatggctgaaaggtcacaaggtcaatttccaagtgacacagttgtgaatccaagagaacatgccaaagccatcacaactagaagtggtaagatattagccactccggaaaagcctgaaacaaacgctagagaagctgagaaaaattttgcagcaactgagaatgataaagataaagctgcagagaagatggaggagcaagatcctgtacctccactaaagaagtgggatttttcacgctttgaaaaaccaccatatccgatattgacaaagcaacaagagcagaagcagcaattcaccagattcttggaaatgtttaagaagttgcacatcaacataccatttgcagaggcattggccaatatgcctaattatgcaaaattcatgaaagaacttctatccaataagaaaaagctgcaagaatgtgaaaccatagcactcacggaagagtgcagtgcaattattcaaaggaaactttctcctaaattgagggatcccggaagttttaacatccttatagccattggtaatattgatgtagggagagcgttatgtgatttaggggctagtataaatttaatgccattgtctatgtgtaagtctctaggcatagctgaacttaaaccaactagagtatcattacaactagcggatagatccttaaggacaccctccgaggtaatagaagatgttttagtaaaggtagataagttcatatttcctgctgatttcattgtgttagatatggaaggcgagagtgaaattcctctacttttaggaaggtctttcctagccactgctagggctttgatagatgttgagcagggcaaattagagctaagattagataatgagtctgtggtttttagtgtatttgatgcgatgaaacatcctaatgataaacatgactgtttccggttagatgtattggatactgtgatttgtgcaggttttgaagcaagtgttacagcagctgaggaagaagatacagaacaatatgcaaccagcaccacacctgaggaacatgcagaaaaatcaacaacagcagaccaaggacagcagcagaattttgtaacagcagctgtatgtaatgcagaaaaatctacagcagaaaatgtttatgaagcacaagcagcagttgaagaaaatgatgaaaaatccagctctgaagatgcaaaggaaccaaagatggaagagctgaaagtaaaggaagatgatattccttccggtgcaccaaaagttgagctgaaagaattaccggaacacttgaagtttgtcttccttggtgataatgagacatatccagtcatcatcaacagagggctggaatggtttgaagaagaaaagctgatcaaagtactcaaggatcacaaatcggcaattggatggtctatttcagacctcaaaggtataaatccatccttttgtactcataagattttaatggaaactgacgttaaacctataagacaaccccaaagaaggctaaatcctacaatgaaagaagtggtgagaaaggaagttgttaagcttttggacgcaggtatgatttatccgatttccgacacaccttgggtaagtccggttcaaacagttccaaagaagggaggtataactgtcatacaaaacgataagaatgaattaatccccacaagaaccattaccagctggagaatgtgcgtagattaccggagacttaacgatgcgactcgtaaagatcacttcccacttccatttatggaccaaatgctggagagactcgccggtcaagattattattgttttcttgacggatattctgggtataaccaaatcccagtttctccggaagatcaagaaaagacagctttcacttgtccatttggagtgttcgcttatagaagaatgccttttgggttatgtaacgcaccagctacttttcaaaggtgcatgcttgcaatcttttcagacatggtagaaaagattcttgaggtattcatggacgattttactatttttggctcttgctttaattcatgtttaactaatttaaccaatgttttgaaaagatgtcaagaaactaacttggtgttaaactgggaaaaatgccatttcatggtaagggaaggcattgtcctaggccacaaaatttctgagatgggaatagaggtcgatagagcaaagcttttgataattgagaaattacctcctcctattaatgtgagtggtgttcgcagctttttaggccatgcaggtttttaccgaagattcatcaaggacttctccaagatcgcaaagccattaagccaactgctggagaaagacattgaattcacctttgatgaagcttgccttgaagcatttaacacgttgaaacaaaagctcaccactgcacctgttttaattgctccggattggagtttgccttttgaattgatgtgtgatgctagtgattatgcagtaggtgttgttttagggcagcggaaagaaaaacgattgcatgtaatctattatgctagcaaaatccttaatgaggcacaaactaattatgcaacaactgagaaagaaatgttagctgttgtgtatgcacttgataagtttagatcatacttagtgggttctaaagtcattatttacactgaccatgcaacccttaaatttttgctgcataaacaagatgcaaaaccccgtttgttgcgatggatgttgcttttgcaggaatttgatcttgaaattagagacaaagctggaatagaaaacaaggttgcagaccatttgtcgagaattcaacataaggaattacaagatggaccggaagtggagattaacgaatccttcccggatgagcaagtgttagccgtacaaatcactccatggtttgctgaaatggctaactacaaagctgctggagtcatacctgaaacattcacttggcagcagagaaagaaatttctgcatgattcgaaaaggtacctctgggataaccccttcttatattttcaatgtgctgaccatgttatccgcagatgcatagcagaaaaagatgtgccggaaattctgtggcactgtcattcatctaattacggaggtcattttggttctaaccgaactgcatagaagatcctacaatgtggctattattggccaacaatattcaaggatgcaaaagactttgtgatgcaatgtgataactgccaacggactggaaatgtatctcgccgagatgagatgcccttgaacaacatacaagaagttgaattatttgatgtatggggtattgacttcatgggacccttccctaagtcttttgctaatcaatatatcttggttgctgtggattacgtttccaagtgggttgaggcaactgcattacctacaaatgatgccaaagtagtcatctcatttttgagaaaaaacatattacaaggtttggagtgcctagagcaataataagtgatggtggaactcatttctgcaacaagcaacttgagagcttgttggctaaatatggagtcaagcacaaagtagcaactccataccatcctcaaacaagtggccaagtggagatctccaaccgagaattgaagcgaatcctggagaaaacggttggaacatcaaggaaagattggtccaagaaattggatgatgctttgtgggcatacagaactgcatttaagaccccaattggtatgtctcctttccaactcctctatggtaaggcttgtcatttacctcttgaacttgaacataaagcaatgtgggcaactaagtttttaaattttgaactaatcaaagctaacgacaaaaggttgcttcagttgaatgaattagatgagttcaggttgaacgcttatgagaatgctcgtatttacaaagagaaaacgaaaaagtggcatgacaaccacatcagatctaaggagtttattctaggccaacaagtactgctttataactcccgcctaaaactttttccgggtaaattgaaatcaagatggtctggaccatttttggtaagagaagtctttccttatggcacagtagcaatctcagccttgaacaatgataaaacatttaaggtaaatggttataggctgaaacattactttggaggggaagtggacagaaattcaagttctgtaccacttaagaccaatgaggtttgaaccacagtaagcgtctagcttaagacgttaaacgagcaccaggttatgtatatatttaagtttaattaagtagaagtaagtttaaatttctgttatcatacttgaaaattttaagtcatgtatccattattacttaaagccttgttacaattttaataagtaagataattagagttcatgtaggttagccaagtaaggtagttgcaaaagttagattagaaaattaagagcagaagcagagagaagaaaagcttttaggcgatgtggcgctaaccgcgccgagtacggtgctaaccgcgccaaggacactgccgttccacgcttgtcgcgcataactcgcgccattcgcgtgaacttttcgaaagataaccaacttctgcataatttcgcgccagtagcgcgaccactgcgccaactgcgtcataagccagtacccaaatgtcaaaattcacgccattagcgtgataatggcgcgggtcgcgtcgattctaaaattcctaaaaccttccagggcaattcacgcgactggcgtgaaaatggcgttactcgcgcgggggaacagaaataaattgaaggtgaagcgtcaaacccacgcaggcaacgtagaaaccgcgcgagtcgcgcggcatagcaaaattcaaatagcctttcactagtatatggcgtgagtggcgccgtactcgcgcgagtcgcgcgagatcgcggaaaccgtttttaaattaaaactcttcattcgcgcccctcacttccaacttcccaaaacttctccataattttcgcccaaaccccagcaatcaccattaacctccttaacccccattaactccttcatcaacccaattcatctttaaaagcttaaaatcattcttcatacccaccacattatcttcattctcttttgtgtttcttcctctgcatctgcatttgcatcagagagcgctaaagctttgaaactgaacaatggcaagagacaaggtatgtttcaaaaactcaaattactttatgtaataacatccataggcaccgatgatacaccatgcttgatgtttaagagttttcacactcgaatatttatgaacatcttgggaaccttagggatagcaccaacttatcataggccttaataaacatgattgttcctttttgctatttttttgtctgtggttctgttttgtttgaaaattttgggtttaaccatgttccaaatatacacatcatattgatttgattttatgcacactatgtgtctgataaaatgtctgaatgagaaatggaatgaaattggtatcaaaatggactcaataggtataaactttggattaactcaaatgctataatgggaataccattgtttactcttaagacatgatagaaacataatgcattaggcttgccatattgattgaatgcacacttagaattataggtagcctaattccatagttcaaagataatgacagaacaatctgattatagtgcactaactatagatataacattgaaatgaattgtgctttctgatttaaatcttgttaaaaatttgagatgtgaactttaggaaatctatagatatatgtatacagttttgatgtggtatgaaacatgcattgaaagtactctgaaccaacttcattgaaccataaccaaaaatctaaatctgggaatcataaccacattgaagtaaatggcgctgttgatgtccaagagactataacctgttgattctaaatatgctaatttggtcaattgtgacatgctttgattgctaataagattaccaagggtataaaatctgggaattgtcattattgaatttaaaatgaaatggaatttccttaaaataaggcacctattgagttgttccaggataacattgcgatggaataaattaaaattgaactgttatttattgcattatcactatcctgttctatcatgcatgatattgaatgagtcactcattagtcttgatattgattagttgtttgaaatcactaatgtttacctattgtcattattagtctgtcatttgtctgcatcaaaggtccaccctagtttagcattaaactaagcactgccagcatacaaatttgggaattgaaaaattattggtgttgaacatccattgaattaactgaagttcccatacttgctgaattggccatttgaactgtgatttcgttaagggttaacaatgagcaacttaaattgtggttggaggagacacaatggcttaagttttagtacctatatttgattgacttgtaacactaattgctcacctgtgtctatcatgattagcaccacaggatttaaaattttgaattgttattacatatgaagagattaaatctgggaatagaaaatttataccttgcttgtaattatattgggggtatactctatttgcattaaggtacatggatacattggtcctagaacctggattacttgattagtgttggaattgaactaccattactcccttaaatctgattctgcactgtgataatttccttgtgtttgttgatttactcccattaaggaaataaatctgggaattactaatggtactttatatgtatatatatctgtattttgttgaaaatttcagggtaaacaggtagcgaaggctgataaaacaaagaagaaagcaaccggtgaaggaagcaggaagcgggcccgagttgcagactttgatgagacccggttccgtacagctgagtgccaggaacgctttgattcctggtacctaccaaagaacatcatcaaagaaaaaaggatcatgtgggaaacattacctgaagacaacccaatccgacaagttattattagacgacagtggcaaaggttcgtaagctttccagagccaagctccagcagtatacttaaggagtttttggcaaatgtaaatcctgacacagtttatcggactcggacttcatgggtgagaggtgtcatagttccgtttggagaatgaactatagagagcatcttggataccgattatgacccgtttgctgcatgcgatttcatcaagcttttcacgcagatgcagcccgatgctataacaaaaatgtatagggaagaagttccaggtttagccactaccatcaggagagccatcaccggcctgtacactgcgtggaaatccaagccaggtcttgactacataccaaaaaagctgaagaaatctgatttacttggagatgcagctttctggcactattttgtgaaccacacggtcatgccctctaccaacatcacagatgtgaacgtagagcgggctattcttctctacacactgagaggtgaaggtaatctcctcgtttccaacgttctttctgaccgtattctccatatgacacaggatgccagtagtaaatcttggctagcccactcttctcttattcttcttttatgccgacatgcgggggtccacattgacgatgatgagcccatggatgtccagatcgcatcactcatgacccataagacctatgtggatgccatggaagctgcagccaaagagcagattattagagcttctaagctcacacctgaggagattgagagtcgttcccctagagatagtttaacaccagaggcacatcagccagaccaaccagcagatgcaccacctattccaccagcacacatagcttcagcaccgtctacatcagctcatcatcctggacatgagccactctacaccgattcagagtcatacttagcttttcaggagtttgtccggtctcagctgacccagcagacacagatgttgggagccatatgcagacatttgggcatccacacatctgaattccagattccactccttcaggcaccaccagtccctgcagctactgatccactcgacatttctgatgctgcagacacagctgtcactcagccattgatccatgagattacacctacacagactgatgtgactggagacagcggtgacagagcagattgatcaggactcattttactgttttattttctaatttagttttatgttattttagttttatattttaatttcagattctgcactacatacattttaaattctgcacttttattttacatatacttttatagtgatgcatacataatatattttcatcttgcagataaactcgttagacaaatgttgagttgcatgcgattttcaaaataatgcttccaattttcaaatttccacaatgcaaattttcaaaagcaccgtgtccttatttgtagttgctggggacagcaacacataaatctgggaatggttaagcattattttacaaatcacaatcaagaaacaaatgaagtctaacagcacaatttcaaaaattttctaaaaataagcagcacacaaaatcttttcagactaaaagcgaatgaacttagtgatagattgaatgcatggatgaagcttgatgaaatgaaatataacatagactgcataatacatgattggaatttgattgttagtatgagaaatgaatgttgaggttaaattgatgcttgaaatgcagtcaaatgggatgaacttgagttataacatctgcaaggttttgagccaaacacggtaaattctttccgagagactccgatttcattgtactctagaacttgaattgtttctctggatgcaggtatgacttgaaatgattaaggcacattttttctttaaactagggccaaattgactaactttttaagtaattttccaattgtaccttatttgagcctaaagcctttcatttcaaaatgatccaaatcaaaaagctacatccaaatgactaaattcctgaggttaaagaaagttgatttaagtctatgacagtggaagcacaaaggaattgttcatcaaagtatcaagaaaagttcaaatatggggtgaagcataagaataaagccaagttggaagtcaatgaaccatcaaattgaaaagttgtgaagctacaataagttgtttaaaaagaaagtgagaaattcaaaaaaaaagaagtttattatttagttttattagaataaatgttgaataaagtaccagattgtgaacaagaaagcaagaagcatgttatggacttaaaagactggatttagcctctcattgagctaccttccaaaaattttatcttagctttagcctagccacgttacaagccggaaagaccttttgatcaagtcataaatagcaactgttgagaatattttcaagcctatggtagtgctgtgattttgttgagtaagagggtaattataaaccttaaacacttgagtgaatgagtgattaaacacaaatctgtaagaaaaactcaggctactcttattgttgatagcattgaaagtaccatgaatagctttgactggaattaatcatacatagcatgactattctaggattgtgaaatgtggattatggttgattattgattcttgctaagtcttgaattcttctgttgctagggacaacaactttcaaatctgggaattgtttgatgtgttgcaaacacatcttgtttttaatctagttttaggatagaatttaattaaataattaggaaaattagttagatttggttaaagttttaatagttattatttttatactgatcaatgccatttaaatatattttaggataatacagaggaaaataagcaaaagaaggaagaaaactcagtctgaagtctcgcgcagatcgcgctggaaacaacgcgggtcgtgccaagtgcagggatggagaacaaactctcgaaggatccacgatactagcatggaatccacgcggttagcgtggaaggacagaatgattggcgcgagtagcgccatatccacgcgagtcgcgtcagtaccttaaggattaaggattttctcctctgtcaaccagcgcaagtagcgccatatccaagcgagtcgcgccagaacttcaaagataaagcatgtttctttctgccaagccacgcgggtagcgccatacgtcacgcgaccagcgccatcctttctgccaactcgcgctagcagcgcgagatcgcgcgcggctcgcgtgggatcgattttctttcctgttttaaaagataggtttcgaaaattagtttatcttttggttttcttaccttaattaaaaagtattataaataggaaacctctaaacacgttggggggacatacattgagaaacatattcttagctttagaattacacaaaccttcattgaaaaccctaggaatcaagcttcaaagcaaaaactctgcacaacaatgtcctattcatctgctttgaattgtttgagtcttatggcaggttaagctttgtattgtgggaaggccatgaacttatgagtcaacctctgtaatgtgactggtattgaatacatatgttatgtttattttaattcttttctgtgctgataatttatcttatttagaattgatcaatctatataagtactgagagttatgattcgcaatgggaacgttggggttgtaatctctgacttgttaagaataacacttgttcttcacctaggaatagggatgcatgagtgcgaagctatgatatgatctttgaatgtttaaattgataggtttcactaaggaattaggttatcaattcagtttaaaaggattaatccactaagacattaggggttaattaatataggaaagacttattctccgagtaaatataacacgaacccataagatttattctctgaattcttagtttgacagaatcgctagaagggtagggttcttgatcgaattaaaggggaaattgctagttatctagtatttacaactataggagagatttatcttatgtaaacttaaagataacaaaatcagttaagttaaggtggtgatacttataaggaattgagcctgaccacaattatcattacattggtaacatttaaatcaattttactgttttactttaatttctgtgttagtcaacgaaatcactcaacaacattattttgcgagattttctgttttctatttcaatcacaactatttaaattgctgtaaaattactccaatccctgtggagacgataactcacttacttactttattacttgtaacgatcggtgcacttgcctaaatcgcacaacaagtttttggcgccgttgccggggattggtaacggatttcacagtaatcttaattttgagattgaaactttttgttactaatcgcttctctaagtttttatgcgaagtccagttagctctgaggagttggaattcgacccagaaattgagagaacactccaacggaggctagctagacaaaagaggagagaagctgaacaattcgactttgattcacttccagaatttgagtcggaagaagaaatggctgaagaacaacccaatcagccaagactgcgaccagaagatgaactaatggaggatattctggctcctatgttcacaagacccaactccagcattgtgagaccaccaatccaagctaatcacttcgatataaacccttcattgatagcattggtggaacgcagtcagtttggaggagatgattcggaagacccacatgattttatagacagattccttagaatctgtgataccattagacatcaaggagtctccgatgacgctgtaaggttgagtctatttccgtttgctgtaaaaggacatgctttaaggtggctgaaccgtcagacatctaatagcattgcaacttgggaggatttagtctcaagatttttcgcagagtacttttccatggataagtataaccgtttggtgaatgaaatcaccaatttcacacaaaatggaaaagagtctctttgcgctgcttggaaccgattccaagaattgatcaggagatgtccacagtatgatatgcctgtaggtaagcaggtaaggatatttttcaatggcatgactcttgagacacgtatgatagtgaatgttgcagctggtggaaccataaggtccaagaccgccgcacaaacgtatgagctgatcaactctttggcccggaatgaaaacgaaagtatgacacaccagccaaagaaagaaccaattcaactttccactaatgatacaatgcttgcggaacaaaagattttggcacatcaactagccaaattaaccgagaagattgatagactgcaagtttctgcagcacaagtggcagtgaatcaaccacgcacagtatgtgagtattgccaaggtgagcatgaatctaacacttgccctattttagttggtgctgaccctgtgcaggtaaacggtgtttggaacgatcaaagacagcaacaacaaccataccagcagcaacaatatcaaagaaacaataattatgcagctggaaataactatcaaagaagatttcaaggaggtggtttggattacaaatccaataactacttgcaacctcctcctctcccaaacaaggaaccttctgagcttgaaaaagtggtgatgcaactgtcaaaaaccatagcggagttcattcaagagaccagagcacaccacagaaaccaagatgcctccatccggaatcttgagattcaaattggtcaattggcaaagcaagttgcagaaaggtcaaaaggacagttcccaagtaccacagagacaaacccaagggaacatgtcaatgctatcaccactagaagtggaaaagtgctacatgaaccagtaaagcatgaggcaagcaacaaggaggttggaaagaaaactgcagcaactgaaccaaccaaagaaaaagctgcagaaaaatttgaagaacaaaaatatgcacctttaaagaagtgggacttctctcgctttgagaaacccccatatctggtgccaaccaagcagcaaatccaacaacagcagtttgccaggttcttagacatgtttaaaaagttacagatgtgctggataacattaattgtgcagataagacagcaacaatagagataaatattgcagtaggggatttggttgcagcagaaaaaccaacagcggcagcagaaaaatctgcagaagcagaagttgtagcagtggcaattgcaaaaaaattgaacattacagatccacaaaacaatgcagaaactcttgaacctgggctggaaaataaaactgatttcttagacagagcaccaaaggtaaaactgaaagaggttgcagcaaaagctgtggaaaaatctaaaaagaaaggtgtcaaaaggttggaagcaaagaaaatcaagaaatggcgtaacaagggaattgagccagaacaaaaggtaatgctagcaacatatcgcatgttatttccaggtaagaaagccttttgttggtctggtccattcatcattcaaaagatttgctcatttggattcatagaaatcatgcctatagatagagggaaaccgtttacagttgctaaatgtcggctggaacctcacattgaaaaccaagtggatagtactgaaattctcaatccacttaaatccgctaatgaataaaagcacgatgcgtctagctaagacgttaaacaagcatttcgtgtgtaattaaatgtttttaatttttggtttttaattttataacagtatgtttaaatttatgcaagtttaatttaaagcatctaggtttattgcattttagtttagataaaaagcatttaaaaataaaaagaaaaggcctataaaaagtgtggcgcgatccgcgccaatctcggcgctactcgcgccaaggttacggccacaccacgctaaccgcgtggatactggcgcgactagcgtcaaacattcgagctgaggctgacctctgcattaaatcacgctattagcgtgaatattggcacaaccagcgccatatcctcggcagctccacgcgattcgcgccgtttccgcgctacccgcgcgagatcgcagacttagttttatttttaaaggctccagcttgtacctcatttcttcctactctcaaattcaaccccaaaacccactcttaacctaaatctcaggacccaaggctgaaattacataagggatatagataaggtaagattctgaaccttatatgttttgaaactcaataatgggatgattatgcactgcactatatcaaactctcatcttctcattcaattctaatgaaatttctggaaaaaccttagggtagagaaccaaatatgaatgagtactaatgaatgatgatcaattggttgtgtgttggctgttttcttttgataaaattttgagttttgatatactccaaatgcacacacaatgttgatttgttttcatgcacattacttgtttgataaaatgcttatatgaaaatttagcttgtaatagtaccaaggttggtttaatatgcacaaagcatcaattaattagaattgcatgaggggaatggctatggtgagcatgaatgactcaacaatgtgtgataatggaatgctattaaagcatgaattgataatgtttttgaaccaaatgccttgaacatgttaaaagcctaaatctgggaatgggaggtttatattttatatgtgcttaagttatcaaataaattgggatatgcttgcatgaaatatgtgagttttgaacttttgatgcatgcaaggatttaaatctgggaattgttgctaggcacatcttggagtatgtttaattctgtggtccccatttgtattgatttaattatgttaacttgtaatatgcctaaatttaaatctgggaatccacattggtaagccttgctaaatgctaaattgttttctaatagttgtagcttggcttgcaattgttaaaactgaaagtacaggtgtctgagaccagtttggggtttgtttataaactgattattaacattgtaacctcaataacaaacagctgattatgtgaaagtatgtaatgctttaaaactgggaatcataggcactgcgaaattctgagcagtaaatgttaaaataattgcacacataattgttgtttttaccaattgtgctgttatatgtttgaatattattcactaatgcacaatttatgagttggttgttgtctggagttacaatgcaaggactaaatctgggaatccagaccaatgcagcagaagatttattggaatttttctacagatcacaattaagcgaatgaaaagaagcaacaaagcaaatgtagtacatactgtagaaaaatgacaataccaggactatttaaatggcttttattgttttctgttttcagtagcttttaatttaactattttattagtcatctgttttaaataagttctgtctcattccaaatgtgattctcaaatactgcatgcttgattagaaatgaacagcatatgctatttttcaattattgccgaggacagcaatttcctaaatctgggaatggtgcacatgcagtatttgattaatcatatttaaggatgtccaacagaaaatttttgttttaattgttttagtcattattttaaatttttagttatttatttcaataaagtgggcagcacatcaaatttttcagactaaaaagggaatgaacacagtaatggataggaattctctgataaaagcctgtgtgagatgaaatatagcatgaattgcatgatatatgattgaattttgattgttggtatatgatatgcatgttgaagttgaaattttgcttgaaatgaagtcaatagtgtttgacttgagtgaaatacctgtgagaattttgagcccaaacaataattatttttcttcttgagagactccattttcttagtactctagaacttgaattgtttctctggatgcaaatataaattgacatgattaaggcaatttcttcttctaaaaaccagggccaaactgacttacgttaaattattattccatttgcacctaattttgagctttagcctttcaattctgctacctaaatcagagctatgtccattgaccaacctccttgaggctagagaaggtaatttaagttcatgacagctgagaacagggaagtgttcatcaaggcatcaaggaaaacaaagtgaattcaattggtatgaaagaaaaagaagaaataagcaacaggccagttgaaaaataataagcctgaaagtatcaatgaaaagtttgaaagttgctgtatgttgaaaagaaaagaaaatcaaaaagaaagtttattgttttgttttagttattataaagaataaattgttgaataagtaccagattttgaagaaggtgaacaaggaaaatggaagaccacaggattggacttaagggattggatctagcctcatactagctacttatccaaaaaaaaaaaaaatttcctacccttagcccagccaagttacaagcctaaaagaccttttgatctaattatgcttgcatctgttgagaatattttcaagcctatggtagtgctttgattatgtttgagtgagggattgattaacctaatacacttgagtgcatgattgcatacacacatttctgtgaggaatactcaaggcatctcattcattgatgaatttgaaagtaccatagaagctttaatataacttgattatactcagcatgataattctaggattgtaaattgtggttcaggtttgattgttgatccttgtttttatcttagagttctgtcttttgctgaggacaacaactattaaatctgggaattgtttgatgtgttgcaaacacatcttgtttttagtctagttttagtttagaatttaattaaatatgtaggaaaatagaatataattagttaaagttagcattttaagctaatttaataccaattttgcaattttaggccaatacagaggaaaacacaagcaaaagaaggaagaaaactcaagactggagttccgcgcgggtagcgtggaaggacagaatggatggcgcgactagcgtcatatcccacgccgttagcgccagaacctcaaggattaagcttatttctctctgccatcccgcgcgacaagcgctatattcgcgctatcagcgccatactttctgccaatccgcgcggatagcgcgagatttcgcgcgggtagcgtggattcaatccagtttcctgttttaaaatatttgtttcgagattaggcttatcttttggttttcttgccttaattaaactattctataaatataaggcctctgagcaggatctcggaaaaatcactatcattttatatcatctatttcattctttctttctcatcttttcaccattggaagtcaagaatcaaggcaaggtcattcaagaatgtattatttgacagcttttggtttcttgaagcctatggcaagctgaatttgtattgtgggaaggccatgaactgatgtaactcctctgtaacttgaattggtattgattctaatgttgttttgattattttattctattctgtgcttatcaatgttattcttatttggaattggccattctatttaagtattgagggttaggattcgcaatgggaacgttggggttctaatttctgacatgtttagaataatagttgttcttcacctaggaatagggatgcgtggctacagattttataatatagtttttgtatgcttaatttgatagatttcaccaaggaattgggttttcgattcaggttaaagagttgattcactaaggaattagggattaactaatttaggaaagatgtatttctgaataatcataacaagaacacatggggtttattctttgaatacttagtttgacagaatcactaagggtttaggtttctcgatcgaattaaagggctaaatcgctggttgtgctctaggatttacgaatttaggaaagatttatcttgtgtgtgacctaagataataaaccaatcaagtgaagaaggtagtaaacaaaagggattgtgcctgaccacaattgtttcttccactggtaatatttctattttactgcatttatttaatttctgttttaatccaactcttcaacacaacacaacaattcttctttattttctgtttttattttccaatcacttagaattaaatctactgtgaaaatcaccccaatccctgtggagacgataactcacttacctactttattacttgttaacgatcggtgcacttgccgtatatattcgcgtaatctcacaacaacgtatttatgtgccgtcaaaactgaccactcagtgtctatgcagcttctaatgctttaactcgttttcaacagttacatcttctgagatgttgactactgaactgccgattatcctctataaatagctattgccagccttaggaaaatctgcaccaagcctctcttctatctcttagtctgagccttcttattcaaaccattatgattaaaccttggaagcctggagaattatcttctcaggaccttaaggctgagaccatgctagagcttcaagaggatatcaaggcgaaattgtatgaagccttgaaagccattagagagagactggatattattaaagaaaagcataaaagagcacagcatcagcaaatatcctagaattcattagattttgtctgatctgctttctagaattaggattcactagatttggattttgtcagatctgctctctatgtaataaatctagatttagtgtttgtctgatctgctttctatctgtaattctcagtttacatcaataaaaatcatgttttgtgtgtactctatttttctgttttttatttcagcatttatatgtactcctcagcttctatgaatgaaatttatgccttctgttcatcaattatccgctgtgcattcaatttttgactttaaaaagccaaatagggggagaataattgaaaatcaaacgaaaatgcaagattttttactttaatttctgtattagtcaacgaaatcactcaacaacactattttgcgagattttctgttttctatttcaatcacaactatttaaattgctgtaaaattactccaatccctgtggagacgataactcacttacttactttattacttgtaacgatcggtgcacttgccgaaatcgcacaacaagtttttggcgccgttgccggggattggtaacggatttcacagtaatcttaattttgagattgaaactttttgttactaatcgcttctctaagtttttatgcgaagttcagttagctctgaggagttggaattcgacccagaaattgagagaacactccaacggaggctagctagacaaaagaggagagaagctgaacaattcgactttgattcacttccagaatttgagtcggaagaagaaatggctgaagaacaacccaatcagccaagactgcgaccagaagatgaactaatggaggatattctggctcctatgttcacaagacccaactccagcattgtgagaccaccaatccaagctaatcacttcgatataaacccttcattgatagcattggtggaacgcagtcagtttggaggagatgattcggaagacccacatgattttatagacagattccttagaatctgtgataccattagacatcaaggagtctccgatgacgctgtaaggttgagtctatttccgtttgctgtaaaaggacatgctttaaggtggctgaaccgttagacatctaatagcattgcaacttgggaggatttagtctcaagatttttcgcagagtacttttccatggataagtataaccgtttggtgaatgaaatcaccaatttcacacaaaatggaaaagagtctctttgcgctgcttggaaccgattccaagaattgatcaggagatgtccacagtatgatatgcctgtaggtaagcaggtaaggatatttttcaatggcatgactcctgagacacgtatgatagtgaatgttgcagctggtggaaccataaggtccaagaccgccgcacaaacgtatgagctgatcaactctttggcccggaatgaaaacgaaagtatgacacaccagccaaagaaagaaccaattcaactttccactaatgatgcaatgcttgcggaacaaaagattttggcacatcaactagccaaattaaccgagaagattgatagactgcaagtttctgcagcacaagtggcagcacaagtggcagtatttatctctattgttgctttcattggtgctcatcttgaacatttcatactcatggattaatgcatgcttccttgatcttctaacttcttcagttccttcatgagtaatctctagcatctcccacatttcttttgcattcttgcatctcactgttctgaaaaattcattagaggaaagtgtagaggtgatcatacttttggctttaaaatcatattgagcatccttttgttcaacttctgtcatctcatcccattctttgggaatcaattcattggcaacaattttctttggaataaaaggacccttttctatagcattccaagcacctgggtcatttgattgaataaagattttcattctatttttccaaaaactgaaatgttccccttcaaacataggaggtctacttaaagaagcaccttccttgaaggttatttgtgaggtattcatttttctttttgaagaaaactagggatcttgaataactctcaagaaccagctcttgatgtcaattgaaaataaaagaaatacttcacaacaaccaagaggggggtgaattggttgaaccttggtattttaaaatcaaattcaaatcagagtttgaggatctttatcacttttaaaaccaagaaaccttatactcaatcaaatagctcagttcaagaattcaatagattaaaacagaacttgttgaacaatgaatgtgattcaaagaattaaagatcaatgaataagatgagaatagagatatagaaataagaacacaagcaatttatactggttcacttcaacaacatgaagctacatccagttacttctagttcacactgcattagagttccactattataaaatattctcacaagcttttacaagaacctctcctttatcaaccctagataaagaacaaaaaatctaaaaccctattagaattctaaggagaaaaatctagaggacactactttgatctttaagttagagaacccttctctagtctcaagctagaagagcccaattacaatagccaattacaacagaatttgtaaacaaaattacaatcaatgagtcaaggaaagaaacaacctgacaatccagtgaatggcatgtatatgaatgaacaattcaggttgaaagacaaaaacaaactcaaaacattcttctttcttaacctttgaaagagacttcttgctttaaagaatcactcaaaaacccatgaatgttttagttgaagcaagaactcatagaacccagaaaaatcactttaaaaagtttttagaaagcttgtgtatgctcagaatacgaattgatcaagttttaaaacaagctgagccatggttctatttataacaaacttttgtaactgtcagtaatcgattaaacgctctatataatcgattatttaactcatgtaatcgattaaattaaccttgtaatagattaaagtgttcaacaaagtttctggacatgagcaacgagaaaaataatcgattattccgtcttgtaatcgattaagacaagaaacttcaaaatatcaaaatgcactatgtaatcgattaaggcaggaagctttaaaaaacagtttgaactaagtaatcgattatgatatgtagtaatcgattaaagcagcaaatcttgtaagcatttacatacaatgtaatcaattactaaatttggtaatagattaagacaggaagatgaatttttcaattaagcctgtgtaatcgattataacactttggtaatcattctttcagaactgcttaaaatcatatatagttgtgtaatcaattactacctattaataatcgattaaagtgttcatcaaggcaatttatacaaaacaaaggtcaaataatcgattattccgataggtaatcgattacattgttcttgaatgcttttctcttcacatttaacacaaatcaatcttcaaggcatccaatgcatgttgaaagctcaaaaccaaagcttgattcctttgcattcttcaaatagctccccatgtaaccaatatctacaactacaaatggaggttcagaagcggttgcatgaacaacttgaggtttgaacttcattcctctaggatttcttctaacatattaaatgaattgtattagaagggtggttcaaagttttaatcaacttgtgagctttaattctattgcaatcagtatttcactagtcaagattgaactgtggtcaaaacatacaaatacttacacacacagagggtgggtggattggggggtggatctcaacttaaattattctttttaaattaaaattccaattactagctattgattttttaccactgggctggttctacgggcattaagcgttgtaggttgattgcacaaaatattagatcaatcattggtttttcaataatctagttgatttggttttgttttttcaaccatggttgcaattgccatgattatagaaattcatgttttatagcacagtggcacctgtgagaataaaattttacttgtaattgaagtcaactacaaataaagtatgtttctttctaagttggaaaaagaaattgaagggatgtaactcttctccgtagaaagaatttattttgtttatcattcatcttgctctttgcattttttatataggaaaatgttagtaattagcatgttatattagtggggaaaattcgaacccatgacctccttatcacttcaacccgtatgccccccctccccctaccccaaccaccaaaccacctacactcctactgttttatgcattttgattcctattttattaattgtatcttttaataaattatcagcttcattacttgacattcccaatcatatatctttgacttgttgaggatacaaattttagttctaagagttacaacactttcccatgaatattttaaccatgtattttagaatattttaagtataataacttcatcctttagtataataatttcagttctaagagttacagttttgtgcatatcattattccacatgctgaagatcagtcgttatagtcctttgttttcccatatagttaattgcttaaattgacaccttttaatatcattttaagactgctcaacaattcttttgtgaataagtaggtcccagtatatgaatctagcaattttattggcccaaccatgttatcagatgtcattgcgaacatggagtgctacaaggtaattttatcactaatcatcaatctataattgtttactaaaaaatttgcaagtgtttaccaatctgtaaatgctacaaggtaatttcatactgaaattgaggtggggcaagtttgtcatctaactatgatgttttctagtatcatgtgaccaagtcatgtgaatttttgaaaaacttgagttatgtgttttaatgttgaccattggttagatttaacacttaatatctatttctttattctctttcatttcacatgtaatttcttttggaaaatatgtatttttttttaactagaaagtttacaacaatgtcttttttatgctttatgtttctatcttttacaccctaactcttttgttatgcatttgaacttcaaatcaatttgtttcagtttgaattgctagcggattctatgtcatgtgccaagaaaatttttgttctacgtaatctttgtctgaaggtaagcataagattatttaattacaatttagtcagtgcacatttgaatgttgtgatgttccttatttttaggatctttcgtgttcagacttttctaatctttaaagagttccaatagcatgaagctcttgaaaaatgccaacttggtgatcttctatatcttgtaaaatgtttcgactatcttttccttttaatgttgcaaacatagtgatattgtctaaatttataatacatttggtattttaatctctccaactttgctcatgtgttcaatgcatacttgcacttgttgttggcatatatttttaaaatttattggtcgtggtattggttatgaattattgtatgttgaatatagtgctttgccaattttctattaacccattcaattttgtagctactaaacttgtgagtgggtttttccatacttggttttcatgttggtataactattgcagctcgtaaatatgatcttagttccgcaactcccttccaaacatcagatgtcttggatctccgtccggttgtcaagcattcagttcctgctgttcagaagccaagtaacttgtggaaactggaaaacttcatttaatgtcattgttgtcttatttttgtacattttccataaacattggaacactattaggcataagttactatgattggtgtgatcactgcgatgttgaaggatataaattatgatgtttgtttaaatgatgtgacattaactcattttcatataatataatgctttgtatttgaaacttatatattccgtgtccaagggcattttataactagttgttaagcgcaataccgaataaatattggtttgtcattttatgtgttgtttttctttttttttttatacgagtcaattcagttagatattactccattggttcatttggtagtagcattatatatatagaatacaattttcaaaaacaaaaaaccgaataaacaaagacgattttaaggcaaaaccatctttgtatataaacatacaaagacgattttggcttaaaaaccgtctttgtaggtatgtaaaaaaataataaataaagatggttttaaggtaaaatcgtctttgtatttttacatacaaagaccgtctttgtaggcatcttataaaaaaaattgataaccaaagacggttttaaggcaaaaccatctttgtatatatacacacaaagacagttttggcttaaaaacagtctttgtaggcatcttataaaaaaatatgacaaacatagatggttttaaaacaaaaccgtctttatatacatacaaagatggttttgatttaaaaaaaccttctttgtaggcatcttataaaaaaatttgataaacaaagacggttttacgtatatatacatataaagacggttttaatttaaaaaccgtttttgtaggcatgtaaaaaaaagagtgatcaatgaagacggttttgtgtcaaaaccgtcttcgtatatatacatacaaagatggttttggcttaaaatcgtcttcgtaagtatgtaaaaaaaacagagttaacaaagacgatttttacaaccgtcgtcaaatgtcatcgttttcaatgacatacgcaacaatgacggttctacaaccgttgttgtaaggggtttagaaccgtcgtcttttgcctattttgtagtagtgaccattgcaaacacgctcatattaatttattgctctagtttcgactaaaataatgaatacataaataaatggttccagttcaacttttcaaacattattagaaatgtatctgggtatgtggtgcgagctagacccttttccaacataacttctaaaacatctagatatttacaagatatataaagtatcatgtaactataacaaatcttgtagacattgcttaaaacataatttcattcatattgaaaatgctcataaatttcttgatctacatgttggaaatgttccttatacaaaaattattgggcctaagtgtatggcaagggcccaagtttaggtttcttagtctccttcataatgatcctatttgctctagacagagacaagagttgccatcatctctttgaaatagaaaagtgtccatgcactttccctctcccttattcaagaataacatgaaagatttgccattcgtaatcgattgagaaggctacgagaggactcaccaaagataaatgaggatattgcattcacgcttcaagaggtaattctctctttttgattagaaagacgaggatgatcttataacattcaaatgtataaggtccaatacgcttctgtagattctatggaatcattcaattggtatcagagcctggttgtacgtttgatgttgatatagtcttttatgtgatatggcacatagggttctatgtttacgttggattacacatgtgctatgttttttataatttttcataagatgtatgtttttttataaaatatgtgcttgaatccatggtagaacatttgaatgtatttctaacctcaccaaattggtattatctagataaatcatttttttaaattccttgtaaaaaatattgaatggatgaatcttttaaattaaaataataatatttaaacctataggctccattgtgggtcccttaataaaatggtcatgtgaaactccatcggataaggatgatcggattttatttgattggacctcaacaagttcaaaatttttagtaaggtattgtacgacccaacgtcgacaatgcttaaatactaaggatattttttgaaattaaacgatgattaattacatttaaattttggtaaaattattaaccctcccattgaggctctggtaatggcatcgaaggcccaaataacaatttcagtttttacaagtagcttattaacacaagtcttgtaaggataactaaagaattgtaacaatgaacaaaagtagttaaggaatctacttgcaactagtatgtttattgtatgattgtaaattgtgtgctttatttttcaagaaaatgtcgtctttcaatccattagctactatgttgagtcaaaagcctatggatggtacaaactacaaacaatggaaaactaattcggatattgttttgcaatatgagaaactcaactttgtcctaactacccataagccagcgtagcctgaagaaaatgcttctgaggaaacaaagaagaaattttctgattgggagaaggcgaatgttgtagctcgctgctatattctggccagtctcgttaatcacttgcaggagcaagtaaacatgcttgatattggagcacaaatgctctgaactcttgatggcaagtttgctactcctagcagttcagctaggcagaatgtgctgactgcggtcaccaaaaccgtgatgactagtggaagtgtgcgaggtcattgtttaacaatgataacaaactttaaactagcggatgacaatgggaataagtttgatcaagaggtaaaggttaatctcctcttacagtcactacctttttacttcaaccagtttagaatgaattataatatgaacatactgaactggatctcactcaactaatgcacgagcttgagagtgctgaacagtctctggtcaagcagggaagttcaatttttgctgaaggttctgttaaacttaaggggaaacccatgggaggtaacaagaagaagaagaactcaaatattccagttgctaaacaaattgcaaagaagcagccaattggcaagttctttaagtgcaatcaaaaggggcattggaagaagaattgcccatgtgtgaaccgaccaagtatgggtaataatttacttgtgattgaggctttcttagtggagaattacagagataaatggatcattgattcaagagccactaaccatgttttttactctttgcagtggttcaaacatagcttgcctattggtcaaggacaaagagttttgagacttagaaatagggagcttgtctctgcactagcagtaggacaagttattttgtcatttgataattatagaacttttgttttgaataactgtttatttgttctagattttaagaggaatttaatttctattagttgtttgattaaacatggtttgacagttcagtttaattcatcagtttctataaggagttcatcttcttttatatgttctggtactttgcttaatggtctttatttccttagtcctataccccatgaagttaatcatgttgaattaggagacgaagagcatgttcatctttctaagaaaaaaaggtttccaattaaacttatctttggcatttgtgattaggtcatattaactctaacaggatacaaggtttggtcaagagtgggattttaaaattcctggattttgaactaatatcagtatgtgaatcatgcttagagggtaaaatgacaaagtgacctttcaaggccaaaggaaatcgtgccacacttcaactggaattggtatatactgatgtatgtcgaccaataaatgtctaggctagaggcaggtatggatacttcatcacatttactgatgattactcaagatttggatacatatacttgatgcgtcataagtctgaagtttttggaaaattccaagagtttaaggttgaggcagaaaaacatcttggtgtttaaatcaagactcttaggtttgactgaggaggtgaatacttacctggagaattcaggtcttacctgactaaggaggggctagtttcacaactatcttctcaagggacaccccaacataatggaagaaacaaaagccttttagaaatggtaaggtccatgcttagttatttgtctctgtctgaatcgttttggggatatgccttagaaactgccatgtacttattaaatttagtttcatctaaatctgtttcaaagacacctatagaactatggaatgggtgcacacccagttggaaccacattcgaatttgtggtgctccagcacatgtcttacaatagaagccaaataaagaggactcatatagaagtgtgcatgtttataggctatcctaaaggaactagaggttggatgttttatagtccaaaaggtaagaagatattagtgagtactcacgcgactttcctagaggaggactatgtggaaaattattaaccaaagagtttgatggttcttgatgagcttgtattaggtcaagttttatctcaacctcaggtggttccatcttatgttcctatggttgttcaaaagagaggaaaatatacttgaaggtgaacatacacaacaactagatatagaactagaagttcagcataatgatctacaagtggaacctgtagaaatgcaagtaccacttgttgaagaacaaaatcaagaattggttaacccaccttatgaggatcttcaagaaattattgatccacctaacttggatcttcatgtagatgcacaacaacaagttaggcaaagttgtagtgggtgaatgacttgtaaacatgcaagatatctcttgttgggagaatcataacaaactgtcaccattgaaagagatgatgatcccactagttacgactatgcacttgaagatgttgatgctcaggaatggcttggggctataaattgtcaaatggaatctatgcattataactcagtttggtctcttgtagaagcacctaaagggataaatcttattgggtgtaaatggatctacaagagaaagagaggatcaaacggaaaggttgaaaccttcaaagctagattggtgccaaaagggtacacccaaatagaaggtgtaaactatgaagaaaccttttcgccagtatccatgctcaagtctattagaattctcttagctattgcagctagtcttaattatgagatttggcaaatggatgtcaagactgcttttctaaatgaaaatttagaagaggacatatatatgcaacaacgaaaagggttcatagtcgaagggtaagaacacatggtgtgcaagttgcaaaggtctatctatggacttaagcaagcatccaggtcatggaaaattaggtttgatcaagttgttaaatcttatggttttgagaaaagtcttgatgaaccatgtgtatataaaagaatccaagcagagcaatatcttttctggtgctttatgtagatgatatactcctcattggaaatgacacaaaagtattcttaggcataaagacttggttgaacaagcattttgatatgaaggacctgagagatactaactatattcttggtattaaactcttacgagaccgaaaaaataggttattgacattgtcccaagcatcctacattgacaaggtccttgccaggttcaacatggagaattctaataagggaagtttacccttcatgcatgggattcatctctctaaggagcattctcctaagacttttgagtagagagaacgcatgagtaggataccttatgcttttgctataggtagtctaatatatgtcatgctgtgcacctggccagacatctgccatgcaatgggagttgttagtcggtaccaatctaatcctggagaggaacactgaatagtggttaagcatatactaaagtatcttaggagaatgaggaattatatgttggtctattatagtgggagtcttgaaactagtggttacatagactcagatttcgaaggagacattgactcaagaaaatccacttcaagctatgtgttcactcttaatggcggggccatctgttagaggagtatcaaacaatcatgtgtggctgactctgccacagaggctaagtatgtagctgcatctgaagctgcaaaagaagccgcatagttgaagaagttgcttatggatattcaagtgataccagatgtgggtctccttatcactctttactgtgacaacagtgtggtagtagcacaatccaaggaaccatgatgtcacaaaggacagaaacacatagaaaggaagtatcacttgatctgagacatcattgaaagaggagacacaatggtaaccaagatagcatcgaaagaaaaccttgctgacccttttaccaagagttttcctgaatgtgtgttcgatagacatgttacatctatgggtcttaagaagattccggacttgctatagctttaggagattgagttttcaatttgtttattttgtgctctttgagcattgtattttttcgaaagttataaatgaagtattattcatttatggtatgcacacaaaaaatttacaaacaccaaggtccggatcaattgtagagtatatgatcatatggatacattcatggaggcactactacaaataatgcctttgacgatgcacatacgacgacggttatatgaaaaccgtcttagtatggtaggcggtggcattaacgcaaatatgaggttaaaaacgacgacgggtattacggaaaccgtcgtcgtttgtgaagcggtggcatttcaaagacggttattatttgaaccgtcgttgcttttaacagtcaattaaaataaaataaggaaacgtgccctagaaagacattcgtccccgagcttgtgttgaaaataaggcaagtcccctccactctcctcctttggctgcggccatcgactccatgatcatgctttcccagtccggcttgtgtcagctaccccatcttcatctccaccacccttgccttcctctccaataacgtaaccacacttacttttctcgattttttatctcccaaggttcttttcctctaggcctgcttccctttccaattagggttaattttggttcgcaccttgactcatctggctcccttgagtatttttgctgacgtcgtcgatctcgctgccaagagtattgttatggtccaggatgtttttgtttctgttaagaacaagcccgatttgaaaatatttgggggtttgttggtgttcctctacgacataggtgtggcagtgtatgctttcaagggaattggaatgattttgcctttggaaactgaggcgaaggacaaggagaagttcgatagggttttgggtttagggatgggttctatttcattgttgtttggtttgtttgggggtttagggtacttagcgtttggggaagaaactaaggatattattaccaccaatttggggcctggggtgattagtgttctggttcagttggggctttgtgttaatctctttttcacttttccgattatgatgaacctagtgaataaggtgatggagagatggttctgcgagtcaaggtactgcttgtggctggggtgggtcatggtgttggtcataagcttggtggcgcttttggtgcccaattttgcggattttttgtccttggtggggagcagtgtgtgtgttgctctgacgtttgtgctgcctacgatgtttcattgtatggtttttaaggaggagttggggtggaggtctgttctttgggatggggcaattgtggtttttgggtttgtgattgcggtcactaggactttcacttccgtgatggagattctttggcctacccctacagcatgattcagcataaaaacaacttgtttggggagaaccattttgggtgctgaaaggtattactcttttgtatcttttattctgaacgtacttttgaatagagtgtaatggtaaaaattcaaacatgttacaatgggagaaacttaggttttttgatgcggcaaccgtgctttacatgttttaagtgtatgcttgatttgtccttgattgctgggaggaattgttatagttggatttgatgctgcctgaatgaagcgttcagtttgttgaatgacctaagaataaagctctatctattctttgttgttgtatgctgttcattttttttgtaaaaattgtagcatatgtacctataataaaccaaggttagatttgtttctcaaacagtggtgaaaataagcttcaaaccccctactgcatctccctctgtgctttagttatttgtatcataaaatcagtttgctttccttctagtccctagttgtctagggatatcaaagcatctatcaaattgtgaagctactcaatcagttgtctatttacgttggcataagttagaactcaaatatatatgatgttttgctgatgctcatatttatatcatgattaaattgtttatgttcaatccaaggtagattattgggctcaacacctttgctttaagagacattgaaacaagtttgtaccaataaataaattactttactgttaaactaataatgattgattacctgccttgcataatacctagtgtagttaagtatgtgtcaaattgttttcaatgtgaattgtgtgattatctgcttccttgaacttcattgctgattagatttgacttttaagaacccaactcttgtagtgggccaaccctggccttcaacttcctttctccgttagcacaccttcattatttgtcttgtcttcagcacaactatcaagtaatattaagaaatttgcctcccaacatgatattagagctcctgagttgtgagtctctatttctgctgccttgaacttcgttgcttataaagatttgacttttgagaacctagctcttgtagtaggagaaatttggccttcaacacaatttcctttctccattttcacaccttcattgtttgttctgtcccttctaccacatgatctccaaaacatgtcctcatactgctgtagaacctccagactggctatcccctgaagccttgtgttgtagacttccacatatgccctcacatgccactttccttgctggcgtgtgagctccacgtaccatgtttctagccaccattcagctttatgcttatcccattttatttattggtatccctctatgttttggtgggccatagcctgagctgcacctattatggtggttccttaatcaaaacccaaagtctttcacactaatcctgagcctctggcaagtggcaatggagagaaaatcagaggaaagaaaatggagagaagagaaaataaagaactctgtaggatgtggtgagagtgtggcagagacaaatcatggtgagctggaagattccatgagtggtatcttaaatttttttatagtagtatattagtatatttatttctatctagttccatttgattttattagttaataacaatacttgaagctggtattggttttagctcatccatgcctactaatactataaaattcttatgacctgttgatcaaatgatgtgagcagggtagaattttgagatggaccagcggggttggctctggaagaaaagatcatccgataaaaacattaaggttgagaatgagaaaccagtgtctacttctgaatctgttacatccgataaattttttttctctaatttccctctaattaagttgacagaaactgcattattgatttatgtttaattggtttctcaaacaaagggggtgacaagacctagcaacttagggcaaaactgtgggaaatagttggagaacaatagtagatattgaggataactggaataagtgagaagcaatgtatttcagttcatattttattgatcaacatttgacatagataaacatgatagctgaaaaattaaagaaatatcaactctcaatgattatttatttatttattttcataattcatttaaaactcattttactccctcacagcatgactaccatagcatatgcaaatgaccgatgggtatcttatgctggacctggaggatggaatggtaattaaataattaattagcctcatcactagtgagtgtgtttggcaaggttgtgaaggtaacttctaacttatttgatttgcttaaaagcatatttgaccaaattaaaactgtttgtaagggagtttatttttgcaacattttggtagtgtttttcttacatggagcttataagctcctatcttctttttttttttttttcatttttatcctaattatcttattataaattatatatatatatatatatatatattgtcacgccattttatacttgtcaactagcttaaaagctagttctattaaatacttataatttataattagctagtctattaacttctagttaacctttcaagcttttaatattaattctgtcaaacacatccaaattgattattatgtatgttattaaatttcagaacattgctattacataaaacgccaaattgatttttttccccgaaaaaaattgatggatccaaaacattttagaaaattataatctatggatataatatgaatatataacttagaaaggcaaattaccacatgggtatttggtatccaatttcttcttccccgaaacccctaaattattgcttttactctaaagtgaaaagagaggaggagaaattatctaaaccacaaagaccctgctcttgcctccacttcctagttctaaggaaattatttttgaattattttaaatattgttgttgataaactattctgcattcaggattaaatttaaagagaaaaatgataattatatactacaagataggatgactaaaaagataaaaagaattatatacaaataaataaaataatatgcagttccatgatgtcaattgtatcttttgaagacctagagtattcatacttggttgatagatcattggagtggggaaaataggttaggtcctcagttgtgctttcttttgtcacaaagcagttttaaaagcatgatctcctaggttcattttatcaaggtagataatatgcttggttaaattttaggaaattgctgcttataaagatttcaacatttcaataccttgatagtttgcacttgatcgacatgttgtaaagtagtataatcagaattcatcctgtctaatatgtaggcctatcgaatctgtcttcacttctgttttaaagttagtctctctctcactcaatttcctcgcatttacaaataaattttctattatacagctgctgtctggctattccacttcttgacttattccttagactgaatcgactttattgttctgtatttcttgttagttttgacatcccataaaaattgaagtttttataggataaatatcttggtctatagattcaaaattgttcttagctactgtacaaccaaaacattaggattaatgagttggtttagaattttcctgggtaaattaagggtatagctttgctaattatggcctattggttatggtggataggataggtaatggcaggagtggtttgagttagctacttagccttgattagtgtcttccaaattacgatttttggcttgatggggtttatgaataaaatgaagcctaattaatgatataaaaggtattttgaatattacaattaggcctgtaatcataactcataaataaaccataatgcttggacaattggatctttaaatttcacaatgccaatgcatcctgcttcacacttgtgttaatgttacttactattggatgtctttctactttaaagtagttcaagcatgtagaataggcttataagaagcaaaatatagttttctatctttaatggttaatgcatttgcggagtcacaggggattcctatggacactgtccactccaaagctatttttggaaaaggttttttttttgtctgcctcatttgatattcctgttttctgtttctctttcaatgctcgttgtaatttgttaatcttaggcactatggtggtttgttacaggttttgttggtgaagttcctgttttccttgcaaagcctcaaacttacatgaatctcagtgatgaatcggtaaggaaataagatgtgttgcctttcttttttctattatccagctatttattttgctttagtttctacaaattcctatgattatgcattcgggcagttgtgatggttttgtgtgtttctccacaagtttttgtggtttcctacagggcattttactttctgtcaggaccactggctgcttattataagctacctcttaatcaggtgctggcggttagttattccatatcccatagattttcttttaagtatctaatcaatgacagctgtgttgttactttatttaatcatgtatttttggttgcagttccatgatgtcaattgtatcttttgttataatgagaagatgcagacagactaagcagatgtagtaagccaaattagttaacattgtgatgcagatagcctatgctttagcatgaatgactttgcaatctcataaaattatgtggatattttagagtcctgattaggttgtatcttgatatttggttttagggggaaaattccattacttaataggtatagattgaaaaaggaaagaaaagaactgatatatattgaaggatctccttacaaccagaggaggaatcctctgttacagtattttagcagaaactatagaaaacaaatgataacgaatggagcaagctcctttgttagtcaaactatcttaactaacttaccttctccttatatcctaacatccttacaagatggcaaatatgaatttggataaaataaaagcaatggtaacgttttgagattttgtagagaaaaggcagctagtgggagcaaaacactatatttgcatgatttaaatttattaaagaggtgctatgcctatgaggtataggaggaaaacagacacatgatttcaagaaaacacaaacaaaactcccaagacttatctgtacacgaaaaccattgacaaaactcttgccatttgtataatttagagttgtatctgcacttgatttcaagattttgaattgttgatatttggttttcttcttcgttgatgtctaatacatttatgctggttgtgaaattgaaaattaacttcatatttgatggttgctttgggcagaggattagttggagccaactcatcacttcaaccctctgtctctgaaggtgtgctcttagctcctttttgtccctactctgcattttaatgttaaaagaaattgttttatatttgtaattggatggggccaggctctttattcttccctttcttctttttgtttgggcccatagtgttcactgccttttagttaacaactattaatgttttttgtttaagctttcttgtgaaataacttcataaattccttgcatattaatttcccccttgttttattttttccactggattacagaatgtttctaatccaaagggagaggtggaaatggttgtagagtgctctatttctcttcctatcaggttgtacttagagcatttcctgcatttgaactgtggaaagattatggatgattttatatggcttgatatgatctcggttccattaggctttggaagattgtttttggttccgaagtggtatatactctttcatgtagatgtataagtttgcctgtgactgtttttggggttattttcttcccattctgtatgttgtgggaaatcagatttttggttgattttaaactctcaggattcttaactctgtttagttattgcacaaaatgttataagtgtcagtagtgttttgtattttctagcattttgtaacatagtattggtataataatctggatgttgtaatggttttaggttatgtgatgttgtaattcgaatagaaaatgttaaatggttttaatatatgatgtggttttaatggttgtattaaatgattcataggtgtaaaataatttaaaacaatttataaacaaacaatttattaataaaattttgtactcaattgttgagatttaaaacaaaaatacaaacgaagacggttatttaggaaaatcgtcatcgtaggttgacatacgatgacgattttctcgtaataaccgtcttcgtatatgtttcataaaaaaattgaactaaaaagaaacgatgacggttattaaaagaaaattgtcatcatatgccaacctacgatgacggttttcctaaataaccgtcttcgtagctttttaatttttaaaaaaattaaaatggaaattaaaaacctacgaaaatggttatttagaaaaaccatcatcgaatgtcaacctacaatgacggttttccttaacaaccgtcttcgtaggtatttaattttaaaaaaatttaaattgaaattaaaaacctacgatgacggttattaccaaaaactgtcatcgtagcatgacttacgatgacggttaattcgtaataactgtcatcgtaggtttttaatttaaaaaattaaaattggaataaaataaaaacaaagacggttattaaggaaaaaccgtcatcgtatgttgacctacgatgacggtttttcattataaccatcatcatttccatttaatttaaaaaataaaaaaattagatacgatgacggtttttgaaaccgtcatcgaaagtatcccctttttaacgacacccacaacaatgacggttcagcaaccgttatcataagggtaaaacaaccgtcattaaaagtgccctatgtagtagtgaggacatgatcattggttctaacaattgatgaatgggttcacaactgttaaataaagttgggcgctttatttaggatgtaatattttatgaaatggtcttgtccgaactattgtaaaatattggtgtaaattaatgttcgcattgaaagggttagggagagatttcaataagattgtttttctgtcataagtatcgaatctctaactaaccatagttatgtgattgctcttaatatgagtttattataaataggcaattgaataattatcattctttgatttaccaacgggtgaggcccgaccaattgatgaccaataactctatattttaggaggaaaattatttgatttcggtatttatgagataaacaacatggaatttgtaggatatgtccccttgatatgtttcggtacttagacattaaacacactggctagtgcatgtaatctattagagaaactatcaaagtcaaggaataaataattgattgattaacagaaaactcatcgaattatcaacatattcgagtcacatatatgttattattattgatattggagttcaacttcgggcttttagtggaacaacatcgagttatataattatttattgattataaggaggcttgattaataatagatggtggatccccgtgctagcttgaaacaaagggtgggacattttcagttaatgatgaaaagtaagttacatggttttgggttttaagcttatgtttgtactcaagagcaagtgagagattgtcgggaatgctctttatacaaaagctattgggattgagtgtatgacaagggcccaagaaacctaggtttaggtttcttagtctcctatataataatcttatttgctctagacaaagacaagaattgtcatcatctctctgaaatagaaaagtgcccacacacttctcctctcccttattcgagaatagtatgaaagatttttcattcgtagttgattgataaggctaagagaggactcaccaaagataaaggaggatactgcattcatgctttaagaggtaattctctcactttgattagaaagacgaggacgatcttataacattcaaacgtactaggtccaatatgcttcttcagattctgtcgaatcctttactatagaggtttaatgctgcaaaaggtatgtgttgcttggtcatcagatccctatcaatatgatgaagtgaatgaagttattttgcctaacgtgatctttaaagtatatttcatgatggaatggcatattttacagttgattttctccaatgttgtgtttggaactagtaaatgaaaaaggggaaaggctgaaatgaagtgaaaatgaatgaaagataaaagtgagagtaatttgtaataagtgagagtaagttgaaaagtttttaaaaattggtgagcctcacacagtttatcttttatcacaaaaagagatgaaatattgtgaattgaaaagtaaaaccaacattggaggaataaaattttcttattgtcaaattagcttcaaagctcctcctaaaacttgtggcatcccgtgtccattgaagcatcaaaacaagttgcaaatgtgaaactgatgtgttgtaaacacatcttaattttagtataggtttaggtctcattttataaaaattcttaggaaattatgttagaattagttaaattcttgtttctaatattttcaaagcaaatcaatactaattactcatttcaggtacaaggcaagaatgagagcctcaattaaaagagaaaagcaagatttaagttccgcgcggttagcgcgggaggtcgcgaggatggcgccaggtgcagggcattgtgcatttttctcgaacatttcacgccattcgcatggacactcacgccaatcgcgccaatttccctaaagcagtacaattactcgatcaactcacgctatctgcgtggatcctcgcgcgattagcgtgactgagtcgaagcaaccacgcaaatcgcgtggaatcaacgtcatcagcgccagaggatgcaattaaaggaattctttcgaacatcttacgcgatccgcgtgactcttcacgtaatcagcgtgagaagagcttggaccaagtctgaagacccgaagaatccatgctatcagcgtggatgcccgcgctggtagcgccacacattcgaaagactcacgctattagcgtggaatcgtacgcgatcagtgtgggtagtgtttttgacaaaaataaagcacgtggtcagcacctgtacttgatttttaggcttttctataaataggaggggaaagaaagtacgaaggggggatgcacacacacagatagtcactaatagtaggaattaggtcagcttttagaccttaggtcatcctctttcatcacccaccctgagaatcaagccctgcagctgatgttctacactccaatggaagatactgcagctgttctgtgcttgaagactatggttggctaaactcctgattgtgggaagggcatgaatctatgagaacttcttgtatcttgattggatggtattgattatatgtattgattgttttactctcttctgcttttatcttactcttgcttgaacttgatcaattcaattaagaacagaggattaggattcgcaatgggaacgttggggttctaatttcggaactgaattagggtaacagttgttcatcgcctaggaatagggatgcggagctgcagtgctagaataggatctttcgaatgcttaatctgatagaatccactaagggattaggttttcaactcagattagagggctatttcactaaggaattaggtgttagctaatttaggaaaggcttagtgctgagcaatcaacgcatgaacctcttatgatttgttctcttaaagcttaatttgacagaatcgctaaacgtttagggttctcgatcggattaaagagtgaaatcgctagttatctaggatttacaattgtaggagaggcttatcatttgtattcattaatgacaatcaaccaatcaagtgaagagaagtaatcatagtggaatgcacctgaccacaattcattctccattggtaattctcataagcaattagctattgatatttcttactttcttatcttatttaattactcaaacaaaaccaacaacaattctgtttttgcattctgtgcttgtaatttcaatcataatagttaaattcctgtgaaattaatctcaatccctgtggagacgatactttacttacactttattacttgataacgatcggtgcacttgccgtaaaaacacattagcattaatcagacaccaagtttttggcgccgttgccggggattgaaacattatttcacagtaattttgtagcttttgtgattgaaattttctgttactaattgcttcttgaagtttatgcaagggttagttgattttgaagagttgcagttcgatcctgaaattgaacgaacactcagaagaagactagctgcccgaaggagacaagaagtagaaacttttgattttatccctgagttagaatcaaaagaagacgaaatggctgaggaaggaaatcgtatgcctccgaggctaagaccggaagatgaactgatggaggatatcttagctctgatgttcacaagacccacctccagtattgtgaggccgcaaatcaatgctaatcattttgatataaatccgtccttgatagtattggtggagcgtagtcaatttggaggggaggattttgaggatccgcacgattttattgatagattcttgagaatctgtgatacaattaggcaccaaggggtcccggatgatgctgtgagattaagtctttttccattcgcggttaaaggaaaagctttgaggtggttgaattgtcagacctctaatagtatagagacttgggaagatttagtctccagattttttgctgagtacttttcaatggagaagtacaacagattggtgaatgaaatcaccaatttcactcaagatggaagagaatctttatgtaatgcctggaagaggttccaagagttaatcaggaggtgtccacagtatgacatgcctgtaggtaagcaagtcaggatatttttcaatggcatgactcctgagacacggatgatagtgaatgttgcagctggtggaaccataagatccaagactgttgcacaaacatatgagttgattagttctcttgcaaggaatgaaaatgaaagtcctagacttcagccaaagagggaacctattcaattgaccactaatgatgcgatgcttgctgaacaaaagattttggcacaacagttagccaagttgaatgagaagatagatagattgcaagcttctgcagcacatgtgggaacaagtcagccaaacattgtttgcgaatattgccaaggcaagcatgaatcaaacacctgtcctatcctcgttggagctgatccggtacaagtgaacggtgtttggaacgatcaaaggcaacaacaacaaccatttcagcagcaaccttatcaaagaaacaccaattatgcagctggaaacacatatcaaagaagattccaaggaggaggattagattataagtctaacaactacttacaaccccctcctataccacacaaggaaccttcagagcttgagaaagtggtgatgcaattgtcaaagaccaccgctgatttcattgctgaaacaagagctcatcggacaaatcaagatgcttccatcagaaacttggagaaccaaattggacagcttgcaaagcaagtagctgaaagacctcaaggtcaatttccaagcgacacaattgtgaatccaagagagcatgccaaagccattacaacaagaagtggcaaagtactagatacaccagcaaaacatgaaacaagcaaaaagaaggaagctggaaattctgcagtagataaaacggagaaggagacagctgaagaaaaagttgaagaatcaaaagttgcacctcaacctaagaagtgggatttttcaagatttgaaaagcctccgtatccggtgctaacgaagcaacaagtgcagaaacaacaatttgccaggttcttagaaatgtttaagaaattgcatattaatataccatttgcagaagcattagctaacatgcctaattatgcaaaatttatgaaagaacttctctctaagaaacataaattacaagaatgtgaaaccataaagcttactgaagaatgtagtgctataattcaaaggaaactacctcctaaattgaaggatcctggaagttttaatatccctatagcaataggtaatattaatatagggagagctttatgtgatttaggggctagcattaatttgatgccattatctctgtgcaagtcattaggcataactgaattgaaaccgactagagtatctttacaattagcggataggtccataagaacaccttccggtgttattgaagatgtactagtaaaggtagagaaattcatattccctgctgattttattgtacttgatatggaaggggaaagcgaaattcctctactattagggagatcatttttagctacagctagagctttaatagatgtcgaacaagggaaacttgaactaagattgaatgatgaatctgtagtgtttaacgtatttgatgccatgaaacatccaactgacaaccaagattgttttaggatggatgtagtggataatgctatttgtgcaggaataacagcagatttagaagccatgaagagtgaaaattggaagatatatctgcagtatttgatgatgaagaaagttgtacaatagcagacaagatggcagaatatgaaggtgaaggaaatactgcagtggactataagatagtagcaaaatcgggggctgaaagtgagaatagatgtgcagaacattcatcaacatcattgttagagaagctggaaatgaaagagggagatatttcttccggagcacctaaggtggagctaaaagaccttccagagcacttaaaatatgttttccttggtgaagatgacacttatccagttattatcaacaaaggtctagattggcatgaggaggtgagattaatcaaagtacttaaggatcacaaatcagctcttggatggtctatttcagaccttaggggtataaatccatccttttgcactcataagattttgatggaggccgatgtaaaaccggtaagacagcctcaaagaaggttaaatccaatcatgaaagaggtcgtgagaaaagaagtagtcaaactgttggatgctgggatgatatatccaatttctgacacaccatgggtcagcccagttcaagttgttccaaagaagggaggaatgacagttattcagaatgaaaagaatgagttaattccttcaaggacgataacgggatggagaatgtgtgtggattatcggagattaaatgatgctacccgcaaagaccatttcccacttccgtttatggatcagatgcttgagagacttgctggacatgattattattgtttcctggatggatattctggatataaccagattccagtagctccagaagatcaagaaaagacagccttcacttgtccattcggggtgttcgcttaccgtaggatgccattcggcttatgcaatgcaccggccacatttcagagatgcatgctttcaattttctctgatatggtagaaagagggcttgaggtattcatggatgatttctctgttttcggaccttgttttaattaatgtctaaccaatttagctaaagtacttaaaagatgtcaagaaacgaatctagtgttaaattgggaaaaatgccattttatggtaagggaaggtatagttttaggccataaaatatctgaaatgggaatggaagttgatagggcaaaacttattttgattgaaaatttaccccctcccattaatgtgagtggtgttcgcagctttttaggacatgcaggtttctatcggagattcatcaaggatttttccaagatagcaaaacccttaagtcaattgctagagaaagaatcggagtttgtatttgatacttcttgtcttaatgcattcaacactttaaagcacaaactcactactgcaccagttttaatagctccagattggagcttaccttttgaaattatgtgtgatgctagtgactttgcaataggagcagtgttaggacagaggaaagagaaaaagttgcatgtgatttattatgctagtaagatacttaatgaggcacaaattaattatgctactactgagaaagagatgctagcagttgtgtattcattagacaagtttcgatcttatttggtaggatctaaagtgattgtgtatactgaccatgcggccataaaattcttgttgcataaacaagatgccaaaccgcgtttgttgcgttggatgttgttgttgcaggaatttgatttagaaatcagagacaaagctggagtagagaataaggtggctgatcacttgtcgagaattcaagcaaaagacttacaagagggaccggaagtgaaaatcaatgagtcttttccggatgagcaagtgctagctgtcaattctactccatggtttgctagcatggcaaatttcaaggctgcaggagttataccagaggaacttagttggcagcagagaaaaaaatttttgcatgatgctaagaggtatttatgggacaacccttacttatactttcaatgtgctgataatgtgattcgtagatgcataactgagagtgaagtagcaaccattctatggcattgtcactcgtctaactatgggggtcactttggagccaatcgaactgcacacaaagtattgcaatgtggctactattggccaacgttgtttaaagactcaaaggattttgtaacgaattgtgataattgtcaaagggtaggcaatgtgtcaagaagagatgaaatgcccttgaacaatatccaagaggttgaactttttgatgtatggggggttgactttatgggaccattccctaagtcattctcaaaccaatacattttggttgctgtagattacgtgtcaaagtgggtagaagcagttgctttacctaccaacgatgccaaggtggtggtttcatttttaaggaagaatattttcacgagatttggagtgccaagagctatcataagtgatggaggaactcacttttgcaataagcaatttgatagcttattagcaaaatatggagtcaagcacaaggtagcaactccatatcatccacaaacgagtggacaagtggaaatctctaatcgtgagctgaaacgaattcttgagaagacagtcggaacttcaagaaaagattggtcgaaaaagctagacgatgcattatgggcataccgaaccgcattcaaaacacctattggtatgtctccctttcaactggtatatggtaaggcttgtcatctcccaattgaacttgagcataaagcactttgggcaactaagtttttgaattttgaattgactaaggctaatgaaaaacgattgcttcaattaaatgaattagatgaatttagactagctgcttatgaaaatgctcgcatttataaagaaaagacaaagaagtggcatgataatcaaatccgaactaaagagtttttacctggtcaacaagttttgttgtacaattctcgtttgaggctttttccaggtaagctgaaatcaagatggtcgggaccatttctagttcgtgaggtctttccatatggaacaattgcgatttcacctctggataatgaccgagcattcaaggtaaatggttaccggttaaagcattacttcggaggagaagtggtcagaacttcaaattctgttccactcaataccattgaagtttaaaacgctaaaagcgtctagctaagacgttaaataagcctggtaatgtacataccttagtttttagttttaaatgttagcttaatctgtattttccctagtgaagtatgtttgcttatttagaggttacatttattttgtatttcaattaggatcagttttaaaattgtgttagaatttaatagtttacttctatgtttagtgtaggtttagagtaatatagtcaggatccatgagtttaggttcttgaaaaagccaaaaatgtgcaattgaacttcagaaaaattttctgtgcagagcatgtcgcgcgattcgcgtcatcgaccacgcggttcgcgccaccctttcgacttatccacgcaattcgcgtggattacagcgccggtagcgttgtatggtcgagacaaaaggaaaatttgggtgaatccgcgctgatagcatcgaataccacgcggattgcgtcgattcacgctgatcgcgtgaacatcgcgtcagtcgcgtgaagtttgacagatttaagcattttgtctgcatcattccgcgctgataacgtggatgtcagcgcggttagcgtgagtcattcgagtttcatgccccttcagtataccttcacgcgattagcgtcgactctcacgtagttagcgtgaggtcgcgcgaagagtttttaaattaaaatgaaccgcctttgagttcatttctctctggtcccgaaactttcctcttctcttttccaaactctctcactctctcaattcccattactgcaaattcctcaaagctacagcagaattccacattcatgaatgcttgtttagtgaatcgcattcaacattcatagtcatttcacgttcgattatcttttcgcgcagagcatcatggtgaaggataaggtacgaagttatttcaactgttatattcaattgattaggtcatgtattgcagtagtatatttcgaatcaaagtcatagactaagtgctttagggcttttgataatcttaaggtgagaacaccatcttagtatagtcttatgtcttcttcataatactgatgatactgctgttctgattgcgattctgttgtctgtggttttgatggtaaaaattttggttttgagcataagcccaacatacttaaatggttcacttttagaattgcattccacatgtttgattcaatgctggaaagaagaaaaacatatgggaaggctgataatgatacactattaaatggaattgggctgtagatatgatcaatgagatgtgaaagctatgccatgaaaagaaccaagttgcatcattttgatcattatcatgattggcctgtcaatgtttaattagaattaagccaaaacacaatctcttgactaaatgtaaatgattaccagatattaaaaattaattttggttaagagattaatatagctttaatggagtataacaaaaaaaccaaaatctgggaatagaaattgctagaaaaagctgtcatgaattttctgaggtaaatttgtgctgatagcaatctaatttccaaagtacactgatgctatttgagtgatctgatgaaaaatctggaatcaagatgttgagtgattgtattaacaatatgttgcatatagagtttgatttacactgaggatttactggttagatggaatcaattggaatgtgctgtgataatggcttggttactgatattgtgaattaaaaagtgttaaatggaagaatacatttatcaacttgcagattatatctggtgattggcatgtaggtaactacatatgtaagtaattagtattctaattgataaaatctaattctaattctggaagcaaagtgattgtgtgtgagctaactattttgcaatgacataattgtatttagccttatagaatctggattgtagttcaaatgcttgaattgattcaagatagatgatacttaagttgaattacattttatgtacatgatcactagtaaatctaggaatgaacattacaaaggaatataggggtaatagggaaatgacttgcaagcatggaacagaggtgttgaatgtttttattgaataagtattgcatcagaagttttgacataacaagagaacctgaatgaatgggaagcatgttcatcagatgtcctgtgattgtcatataattggatactgttgagtaaaagtggaaattatggtgaattacaatgtgtttttcaattgagccatattattaatttaattctgtaccaaaggttctaaatctgggaattgaatatggtattctcaattaataattcaatgcattatgctgtgcttttatgacttattttatcacatgcatgactagacagaaattcatactaccttgcattactggtgatgaattcgtgatgttagcatgatgggtactgtttgcataataaatctgggaatcatgcttcaatgttaactgctgcagggtaagcaagtagctagtggtaagaaaaagaccactggtgaaagaagcaggaaacgacccagagctccagattttgatgagcatcgattcaggactccagcatgccaggagaagttcgagtcatggtatctcccgaagaagattattttggagaagaagatcatgtgggagactcttccggaagataatccagtgagagaggttatagttcgtcgtcggtggcagaagttagttagttttcctgcgccgagctccagcacgattttgaaggaatttctggcgaatgtggaccacgatacagtgtctcggactagggtgtcgtgggtgaggggtgtccaggtctcttttgatgaccgtaccatcgagcaaattttggacacagcctatgatccctttgagagctgtgagttttatcagcttttccttcgcatgcagcccgatgcattgacgaagatgtacagggacgacgttcctgaacttgccactattatccgcagggccatcactagtctttatacttcctggaagcccaaatctgggcttgattacattccagagaagttgcggaaacatgatttagtgggagatgctttgttttggcatcagttcattaatcacacagtcataccttctacaaatatgactgatgtgaatgtagagcgtgctattctactgtatatcctcaggggtgagggtaaccttattatctcatgccttctttccaggaggattcttcatatgattcaggacgtcagcagtaagtcctggttagctcactcttctctcattcttcttctttgccgacatgcgggcgtccacattgacgaggaggagcccatggatgttccgatttctacgatcttattacataagagttatatggatgccatggcatctgctgcggatgagcagatccttcgagcttctaagctcaagccagaggagctcgccattgttcacctcgagattttcccataccagagataccagtccagccacagccagtttcaccaccacattcaccaccagtggccgctacatcaccatcctcagcacatattcccactcaggagcctatttttgctgactctacatcttttatagcttttcaggactttgtgagggaccagctagatcatcatgctcgtatgcttggagctatttgccagcatctgggtattcctccttcagcatatcagacatccagtatcccccctccagcagatcctttggtcaccgatccagtagtcacagctgaggtcgttactattccgagcactcagccagtgattccagagtctgcagttgctgatgttgctactactatggatggagagggcgcatagagacaccaggattcagtttatgtttatgtttatgtttctgattatgatcctgtttatggagtgtgatttacctagctttgcacagtattttatgcatagactttttacattactctacattatatacaacatgcagtattcagtctagctttccgacttaatttgttcatgaataatcgttagtttagttagatttagaattcgtttccgtcaatattatagtttgaagcatcaattccttgttgtgtttgctggggacagcaacatataaatctgggaatggtatgttatgcatacgcttttaaaaaaaaaatatatatatatatatatatatatattggaatttaaaataagcagcacacaaaagttttcagattaagaagcgaatgtactcaatgatggacagatttctctagattagcttgatgacataagatgcatggactgcataatgcatgagtagaattgattgaatgcatgagaaactcatgttgatgttgaaatgatgtcagatatgcagttgattgagaatgcttgagtttcaacacctgtaaggtttgagccaaacacggtaacttttcttccgagagactccatatttcatggtattctagaacttggattgtttctctgagtgcaggtatggtttgaaatgattaaggcgattttttttgtaataaccagggccaaatggacttaccataagtgattatcctttgaacctgaaattgagcctaagcttttcatttcaataacctgaatttaagccagatccaaatgactagaatcccttttgaggctagtgaaggaagaataagtccacactcagtaaaaattcttgatcaaaagtcatcaactgaaaaatgtgagttgctgcaatagtcagttgtttaaatgacaatgtattgattgttttaaaaatatatatatatatatatatatatatatatataaatttatatatgtaaatacaaaagaaagtcagtatcatgtttattttctttgagaataagaaatttgaatgaaatatgccagtttgaaatggaagagaaggcaaaagtttaggtgataagtctaactatcgtagatgcataactgagagtgaagtagcaaccattctatggcattgtcactcgtctaactatgggggtcactttggagccaatcgaactgcacacaaagtattgcaatgtggctactatcggccaacgttgtttaaagactcaaaggattttgtaacgaattgtgataattgtcaaagggtaggcaagtgcaccgatcgttatcaagtaataaagtgtaagtaaagtatcgtctccacagggattgagattaatttcacaggaatttaactattatgattgaaattacaagcgcagaatgcaaaaacagaattgttgttggttttgtttgagtaattaaataagataagaaagtaagaaatatcaatagctaattgcttatgagaattaccaatggagaatgaattgtggtcaggtgcattccactatgattacttctcttcacttgattggttgattgtcattaatgaatacaaatgataagcctctcctacaattgtaaatcctagataactagcgatttcactctttaatccgatcgagaaccctaaacgtttagcgattctgtcaaattaagctttaagagaacaaatcataagaggttcatgcgttgattgctcagcactaagcctttcctaaattagctaacacctaattccttagtgaaatagccctctaatctgagttgaaaacctaatcccttagtggattctatcagattaagcattcgaaagatcctattctagcactgcagctccgcatccctattcctaggcgatgaacaactgttaccctaattcagttccgaaattagaaccccaacgttcccattgcgaatcctaatcctctgttcttaattgaattgatcaagttcaagcaagagtaagataaaagcagaagagagtaaaacaatcaatacatataatcaataccatccaatcaagatacaagaagttctcatagattcatgcccttcccacaatcaggagtttagccaaccatagtcttcaagcacagaacagctgcagtatcttccattggagtgtagaacatcagctgcagggcttgattctcagggtgggtgatgaaagaggatgacctaaggtctaaaagctgacctaattcctactattagtgactatctgtgtgtgtgcatccccccttcgtactttctttcccctcctatttatagaaaagcctaaaaatcaagtacaggtgctgaccacgtgctttatttttgtcaaaaacactacccacgctgatcgcgtacgattccacgctaatagcgtgagtcttttgaatgtgtggcgctaccagcgcgggcatccacgctgatagcgtggattcttcgggtcttcagacttggtccaagctcttctcacgctgattacgtgaagagtcacgcggatcgcgtgagatgttcgaaagaattcctttaattgcatcctctggcgctgatgacgttgattccacgcgatttgcgtggttgcttcgactcagtcacgctaatcgcgcgaggatccacgcagatagcgtgagttgatcgagtaattgtactactttagggaaattggcgcgattggcgtgagtgtccatgcgaatggcgtgaaatgttcgagaaaaatgcacaatgccctgcacctggcgccatcctcgcgacctcccgcgctaaccgcgcggaacttaaatcttgcttttctcttttaattgaggctctcattcttgccttgtacctgaaatgagtaattagtattgatttgctttgaaaatattagaaacaagaatttaactaattctaacataatttcctaagaatttttataaaatgagacctaaacctatactaaaattaagatgtgtttacaacacatcaaacaattcccagatttgaaagttgctgtcctcagcaatagaaagaagtctaaagcttaagtaagaatcaataatcagctcaaaccgcactttacaatcctagaattctcatgacatgcttaatcaactcagtttcagcttctataatgcttcaatgctgttaaaataagaatttacttgagtcttcctcacatatgtatgtgtatgtattcaatcactcaagtctattagctataataactcacttactcaacataatcacagcattaccataagcttggaaatattctcattgattgcaagtatgaattgatcaaaaggacttaaaggcttgtaacgtggctgggctaagggtaggaattgtttaggaaaagtagctcaataagaggctagttccagatccctaagttcattcttgacttatcacctaaacttttgccttctcttccatttcaaactggcatatttcattcaaatttcttattctcaaagaaaataaacatgatactgactttcttttgtatttacatatataaatttatatatatatatatatatatatatttttttttttaaaacaatcaatacattgtcatttaaacaactgactattgcaacaactcacatttttcagttgatgacttttgatcaagaatttttactgagtatggacttattcttccttcactagcctcaaaagggattctagtcatttggatctggcttaaattcaggttattgaaatgaaaagcttaggctcaatttcaggttcaaaggataatcacttatggtaagtccatttggccctggttattacaaaaaaaatcgccttaatcatttcaaaccatacctgcactcagagaaacaatccaagttctagaataccatgaaatatggagtctctcggaagaaaagttaccgtgtttggctcaaaccttacaggtgttgaaactcaagcattctcaatcaactgcatatctgacatcatttcaacatcaacatgagtttctcatgcattcaatcaattctactcatgcattatgcagtccatgcatcttatgtcatcaagctaatctagagaaatctgtccatcattgagtacattcgcttcttaatctgaaaacttttgtgtgctgcttattttaaattccaatatatatatatatatatatatatatatatatatatatttttaaaagcgtatgcataacataccattcccagatttatatgttgctgtccccagcaaacacaacaaggaattgatgcttcaaactataatattgacggaaacaaattctaaatctaactaaactaacgattattcatgaacaaattaagtcggaaagctagactgaatactgcatgctgtatataatgtagagtaattaaaaagtctatgcataaaatactgtgcaaagctaggtaaatcacactccataaacaggatcataatcagaaacataaacataaacataaacggaatcctggtgtctctatgcgccctctccatccatagtagtagcaacatcagcaactgcagactctggaatcactggctgagtgctcggaatagtaacgacctcagctgtgactactggatcggtgaccaaaggatctgctggaggggggatactggatgtctgatatgctgaaggaggaatacccagatgctggcaaatagctccaagcatacgagcatgatgatctagctggtccctcacaaagtcctgaaaagctataaaagatgtagagtcagcaaaaataggctcctgagtgggaatatgtgctgaggatggtgatgtagcggccactggtggtgaatgtggtggtgaaactggctgtggctggactggtatctctggtatgggaaaatctcgaggtgaacaatggcgagctcctctggcttgagcttagaagctcgaaggatctgctcatccgcagcagatgccatggcatccatataactcttatgtaataagatcgtagaaatcggaacatccatgggctcctcctcgtcaatgtggacgcccgcatgtcggcaaagaagaagaatgagagaagagtgagctaaccaggacttactgctgacgtcctgaatcatatgaagaatcctcctggaaagaaggcatgagataataaggttaccctcacccctgaggatatacagtagaatagcacgctctacattcacatcagtcatatttgtagaaggtatgactgtgtgattaatgaactgatgccaaaacaaagcatctcccactaaatcatgtttccgcaacttctctggaatgtaatcaagcccagatttgggcttccaggaagtataaagactagtgatggccctgcggataatagtggcaagttcaggaacgtcgtccctgtacatcttcgtcaatgcatcgggctgcatgcgaaggaaaagctgataaaactcacagctctcaaagggatcataggctgtgtccaaaatttgctcgatggtacggtcatcaaaagagacctgaacacccctcacccacgacaccctagtccgagacactgtatcatggtccacattcgccagaaattccttcaaaatcgtgctggagctcggcgcaggaaaactaactaacttctgccaccgacgacgaactataacctctctcactggattatcttccggaagagtctcccacatgatcttcttctccaaaataatcttcttcgggagataccatgactcgaacttctcctggcatgctggagtcctgaatcgatgctcatcaaaatctggagctctgggtcgtttcctgcttccttcaccagtggtctttttcttaccactagctacttgcttaccctgcagtagttaacattgaagcatgattcccagatttattatgcaaacagtacccatcatgctaacatcacgaattcatcaccagtaatgcaaggtagtatgaatttctgtctagtcatgcatgtgataaaataagtcataaaagcacagcataatgcattgaattattaattgagaataccatattcaattcccagatttagaacctttggtacagaattaaatcaataatatggctcaattgaaaaacacattgtaattcaccataatttccacttttactcaacagtatccaattatatgacaatcacaggacatctgatgaacatgcttcccagtcattcaggttctcttgttatgtcaaaacttctgatgcaatacttattcaataaaaacattcaacacctctgttccatgcttgcaagtcatttccctattacccctatattcctttgtaatgttcattcctagatttactagtgatcatgtacataaaatgtaattcaacttaagtatcatctatcttgaatcaattcaagcatttgaactacaatccagattctataaggctaaatacaattatgtcattgcaaaatagttagctcacacacaatcactttgcttccagaattagaattagattttatcaattagaatactaattacttacatatgtagttacctacatgccaatcaccagatataatctgcaagttgataaatgtattcttccatttaacactttttaattcacaatatcagtaaccaagccattatcacagcacattccaattgattccatctaaccagtaaatcctcagtgtaaatcaaactctatatgcaacatattgttaatacaatcactcaacatcttgattccagatttttcatcagatcactcaaatagcatcagtgtactttggaaattagattgctatcagcacaaatttacctcagaaaattcatgacagctttttctagcaatttctattcccagattttggtttttttgttatactccattaaagctatattaatctcttaaccaaaattaatttttaatatctggtaatcatttacatttagtcaagagattgtgttttggcttaattctaattaaacattgacaggccaatcatgataatgatcaaaatgatgcaacttggttcttttcatggcatagctttcacatctcattgatcatatctacagcccaattccatttaatagtgtatcattatcagccttcccatatgtttttcttctttccagcattgaatcaaacatgtggaatgcaattctaaaagtgaaccatttaagtatgttgggcttatgctcaaaaccaaaatttttaccatcaaaaccacagacaacagaatcgcaatcagaacagcagtatcatcagtattatgaagaagacataagactatactaagatggtgttctcaccttaagattatcaaaagccctaaagcacttagtctatgactttgattcgaaatatactactgcaatacatgacctaatcaattgaatataacagttgaaataacttcgtaccttatccttcaccatgatgctctgcgcgaaaagataatcgaacgtgaaatgactatgaatgttgaatgcgattcactaaacaagcattcacgaatgtggaattctgctgtagctttgaggaatttgcagtaatgggaattgagagagtgagagagtttggaaaagagaagaggaaagtttcgggaccagagagaaatgaactcaaaggcggttcattttaatttaaaaactcttcgcgcgacctcacgctaactacgtgagagtcgacgctaatcgcgtgaaggtatactgaaggggcatgaaactcgaatgactcacgctaaccgcgctgacatccacgttatcagcgcggaatgatgcagacaaaatgcttaaatctgtcaaacttcacgcgactgacgcgatgttcacgcgatcagcgtgaatcgacgcaatccgcgtggtattcgatgctatcagcgcggattcacccaaattttccttttgtctcgaccatacaacgctaccggcgctgtaatccacgcgaattgcgtggataagtcgaaagggtggcgcgaaccgcgtggtcgatgacgcgaatcgcgcgacatgctctgcacagaaaatttttctgaagttcaattgcacatttttggctttttcaagaacctaaactcatggatcctgactatattactctaaacctacactaaacatagaagtaaactattaaattctaacacaattttaaaactgatcctaattgaaatacaaaataaatgtaacctcgaaataagcaaacatacttcactagggaaaatacagattaagctaacatttaaaactaaaaactaaggtatgtacattaccaggcttatttaacgtcttagctagacgcttttagcgttttaaacttcaatggtattgagtggaacagaatttgaagttctgaccacttctcctccgaagtaatgctttaaccggtaaccatttaccttgaatgctcggtcattatccagaggtgaaatcgcaattgttccatatggaaagacctcacaaactagaaatggtcccgaccatcttgatttcagcttacctggaaaaagcctcaaacgagaattgtacaacaaaacttgttgaccaggtaaaaactctttagttcggatttgattatcatgccacttctttgtcttttctttataaatgcgagcattttcataagcagctagtctaaattcatctaattcatttaattgaagcaatcgtttttcattagccttagtcaattcaaaattcaaaaacttagttgcccaaagtgctttatgctcaagttcaattgggagatgacaagccttaccatataccagttgaaagggagacataccaataggtgttttgaatgcggtttggtatgcccataatgcatcgtctagctttttcgaccaatcttttcttgaagttccgactgtcttctcaagaattcgtttcagctcacgattagagatttccacttgtccactcgtttgtggatgatatggagttgctaccttgtgcttgactccatattttgctaataagctatcaaattgcttattgcaaaagtgagttcctccatcacttatgatagctcttggcactccaaatctcgtgaaaatattcttccttaaaaatgaaaccaccaccttggcatcgttggtaggtaaagcaactgcttctacccactttgacacgtaatctacagcaaccaaaatgtattggtttgagaatgacttagggaatggtcccataaagtcaaccccccatacatcaaaaagttcaacctcttggatattgttcaagggcatttcatctcttattgacacattgcctaccctttgacaattatcacaattcgttacaaaatcctttgagtctttaaacaacgttggccaatagtagccacattgcaatactttgtgtgcagttcgattggctccaaagtgacccccatagttagacgagtgacaatgccatagaatggttgctacttcactctcagttatgcatctacgaatcacattattagcacattgaaagtataagtaagggttgtcccataaatacctcttagcatcatgcaaaaatttttttctctgctgccaactaagttcctctggtataactcctgcagccttgaaatttgccatgctagcaaaccatggagtagaattgacagctagcacttgctcatccggaaaagactcattgattttcacttccggtccctcttgtaagtcttttgcttgaattctcgacaagtgatcagccaccttattctctactccagctttgtctctgatttctaaatcaaattcctgcaacaacaacatccaacgcaacaaacgcggtttggcatcttgtttatgcaacaagaattttatggccgcatggtcagtatacacaatcactttagatcctaccaaataagatcgaaacttgtctaatgaatacacaactgctagcatctctttctcagtagtagcataattaatttgtgcctcattaagtatcttactagcataataaatcacatgcaactttttctctttcctctgtcctaacactgctcctattgcaaagtcactagcatcacacataatttcaaaaggtaagctccaatctggagctattaaaactggtgcagtagtgagtttgtgctttaaagtgttgaatgcattaagacaagaagtatcaaatacaaactccgattctttctctagcaattgacttaagggctttgctatcttggaaaaatccttgatgaatctccgatagaaacctgcatgtcctaaaaagctgcgaacaccactcacattaatgggagggggtaaattttcaatcaaaataagttttgccctatcaacttccattctcatttcagatattttatggcctaaaactataccttcccttaccataaaatggcatttttcccaatttaacactagattcgtttcttgacatcttttaagtactttagctaaattggttagacattaattaaaacaaggtccgaaaacagagaaatcatccatgaatacctcaagccctctttctaccatatcagagaaaattgaaagcatgcatctctgaaatgtggccggtgcattgcataagccgaatggcatcctacggtaagcgaacaccccgaatggacaagtgaaggctgtcttttcttgatcttctggagctactggaatctggttatatccagaatatccatccaggaaacaataataatcatgtccagcaagtctctcaagcatctgatccataaacggaagtgggaaatggtctttgcgggtagcatcatttaatctccgataatccacacacattctccatcccgttatcgtccttgaaggaattaattcattcttttcattctgaataactgtcattcctcccttctttggaacaacttgaactgggctgacccatggtgtgtcagaaattggatatatcatcccagcatccaacagtttgactacttcttttctcacgacctctttcatgattggatttaaccttctttgaggctgtcttaccggttttacatcggcctccatcaaaatcttatgagtgcaaaaggatggatttatacccctaaggtctgaaatagaccatccaagagctgatttgtgatccttaagtactttgattaatctcacctcctcatgccaatctagacctttgttgataataactggataagtgtcatcttcaccaaggaaaacatattttaagtgctctggaaggtcttttagctccaccttaggtgctccggaagaaatatctccctctttcatttccagcttctctaacaatgatgttgatgaatgttctgcacatctattctcactttcagcccccgattttgctactatcttatagtccactgcagtatttccttcaccttcatattctgccatcttgtctgctattgtacaactttcttcatcatcaaatactgcagatatatcttccaatttttcactcttcatggcttctaaatctgctgttattcctgcacaaatagcattatccactacatccatcctaaaacaatcttggttgtcagttggatgtttcatggcatcaaatacgttaaacactacagattcatcattcaatcttagttcaagtttcccttgttcgacatctattaaagctctagctgtagctaaaaatgatctccctaatagtagaggaatttcgctttccccttccatatcaagtacaataaaatcagcagggaatatgaatttctctacctttactagtacatcttcaataacaccggaaggtgttcttatggacctatccgctaattgtaaagatactctagtcggtttcaattcagttatgcctaatgacttgcacagagataatggcatcaaattaatgctagcccctaaatcacataaagctctccctatattaatattacctattgctatagggatattaaaacttccaggatccttcaatttaggaggtagtttcctttgaattatagcactacattcttcagtaagctttatggtttcacattcttgtaatttatgtttcttagagagaagttctttcataaattttgcataattaggcatgttagctaatgcttctgcaaatggtatattaatatgcaatttcttaaacatttctaagaacctggcaaattgttgtttctgcacttgttgcttcgttagcaccggatacggaggcttttcaaatcttgaaaaatcccacttcttaggttgaggtgcaacttttgattcttcaactttttcttcagctgtctccttctccgttttatctactgcagaatttccagcttccttctttttgcttgtttcatgttttgctggtgtatctagtactttggcacttcttgttgtaatggctttggcatgctctcttggattcacaattgtgtcgcttggaaattgaccttgaggtctttcagctacttgctttgcaagctgtccaatttggttctccaagtttctgatggaagcatcttgatttgtccgatgagctcttgtttcagcaatgaaatcagcggtggtctttgacaattgcatcaccactttctcaagctctgaaggttccttgtgtggtataggagggggttgtaaggagttgttagacttataatctaatcctcctccttggaatcttctttgatatgtgtttccagctgcataattggtgtttctttgataaggttgctgctgaaatggttgttgttgttgcctttgatcgttccaaacaccgttcacttgtaccggatcagctccaacgaggataggacaggtgtttgattcatgcttgccttggcaatattcgcaaacaatgtttggctgacttgttcccacatgtgctgcagaagcttgcaatctatctatcttctcattcaacttggctaactgttgtgccaaaatcttttgttcagcaagcatcgcatcattagtggtcaattgaataggttccctctttggctgaagtctaggactttcattttcattccttgcaagagaactaatcaactcatatgtttgtgcaacagtcttggatcttatggttccaccagctgcaacattcactatcatccgtgtctcaggagtcatgccattgaaaaatatcctgacttgcttacctacaggcatgtcatactgtggacacctcctgattaactcttggaacctcttccaggcattacataaagattctcttccatcttgagtgaaattggtgatttcattcaccaatctgttgtacttctccattgaaaagtactcagcaaaaaatctggagactaaatcttcccaagtctctatactattagaggtctgacaattcaaccacctcaaagcatttcctttaaccgcgaatggaaaaagacttaatctcacagcatcatccgggaccccttggtgcctaattgtatcacagattctcaagaatctatcaataaaatcgtgcggatcctcaaaatcctcccctccaaactgactacgctccaccaatactatcaaggacggatttatatcaaaatgattagcattgatttgcggcctcacaatactggaggtgggtcttgtgaacatcggagctaagatatcctccatcagttcatcttccggtcttagcctcggaggcatacgatttccttcctcagccatttcgtcttcttttgattctaactcagggataaaatcaaaagtttctacttcttgtctccttcgggcagctagtcttcttctgagtgttcgttcaatttcaggatcgaactgcaactcttcaaaatcaactaacccttgcataaacttcaagaagcaattagtaacagaaaatttcaatcacaaaagctacaaaattactgtgaaataatgtttcaatccccggcaacggcgccaaaaacttggtgtctgattaatgctaatgtgtttttatggcaagtgcaccgatcgttatcaagtaataaagtgtaagtaaagtatcgtctccacagggattgagattaatttcacaggaatttaactattatgattgaaattacaagcgcagaatgcaaaaatagaattgttgttggttttgtttgagtaattaaataagataagaaagtaagaaatatcaatagctaattgcttatgagaattaccaatggagaatgaattgtggtcaggtgcattccactatgattacttctcttcacttgattggttgattgtcattaatgaatacaaatgataagcctctcctacaattgtaaatcctagataactagcgatttcactctttaatccgatcgagaaccctaaacgtttagcgattctgtcaaattaagctttaagagaacaaatcataagaggttcatgcgttgattgctcagcactaagcctttcctaaattagctaacacctaattccttagtgaaatagccctctaatctgagttgaaaacctaatcccttagtggattctatcagattaagcattcgaaagatcctattctagcactgcagctccgcatccctattcctaggcgatgaacaactgttaccctaattcagttccgaaattagaaccccaacgttcccattgcgaatcctaatcctctgttcttaattgaattgatcaagttcaagcaagagtaagataaaagcagaagagagtaaaacaatcaatacatataatcaataccatccaatcaagatacaagaagttctcatagattcatgcccttcccacaatcaggagtttagccaaccatagtcttcaagcacagaacagctgcagtatcttccattggagtgtagaacatcagctgcagggcttgattctcagggtgggtgatgaaagaggatgacctaaggtctaaaagctgacctaattcctactattagtgactatctgtgtgtgtgcatccccccttcgtactttctttcccctcctatttatagaaaagcctaaaaatcaagtacaggtgctgaccacgtgctttatttttgtcaaaaacactacccacgctgatcgcgtacgattccacgctaatagcgtgagtcttttgaatgtgtggcgctaccagcgcgggcatccacgctgatagcgtggattcttcgggtcttcagacttggtccaagctcttctcacgctgattacgtgaagagtcacgcggatcgcgtgagatgttcgaaagaattcctttaattgcatcctctggcgctgatgacgttgattccacgtgatttgcgtggttgcttcgactcagtcacgctaatcgcgcgaggatccacgcagatagcgtgagttgatcgagtaattgtactactttagggaaattggcgcgattggcgtgagtgtccatgcgaatggcgtgaaatgttcgagaaaaatgcacaatgccctgcacctggcgccatcctcgcgacctcccgcgctaaccgcgcggaacttaaatcttgcttttctcttttaattgaggctctcattcttgccttgtacctgaaatgagtaattagtattgatttgctttgaaaatattagaaacaagaatttaactaattctaacataatttcctaagaatttttataaaatgagacctaaacctatactaaaattaagatgtgtttacaacacatcaaacaattcccagatttgaaagttgctgtcctcagcaatagaaagaagtctaaagcttaagtaagaatcaataatcagctcaaaccgcactttacaatcctagaattctcatgacatgcttaatcaactcagtttcagcttctataatgcttcaatgctgttaaaataagaatttacttgagtcttcctcacatatgtatgtgtatgtattcaatcactcaagtctattagctataataactcacttactcaacataatcacagcattaccataagcttggaaatattctcattgattgcaagtatgaattgatcaaaaggacttaaaggcttgtaacgtggctgggctaagggtaggaattgtttaggaaaagtagctcaataagaggctagttccagatccctaagttcattcttgacttatcacctaaacttttgccttctcttccatttcaaactggcatatttcattcaaatttcttattctcaaagaaaataaacatgatactgactttcttttgtatttacatatataaatttatatatatatatatatatatatatatatatatatatatttttttaaaacaatcaatacattgtcatttaaacaactgactattgcaacaactcacatttttcagttgatgacttttgatcaagaatttttactgagtatggacttattcttccttcactagcctcaaaagggattctagtcatttggatctggcttaaattcaggttattgaaatgaaaagcttaggctcaatttcaggttcaaaggataatcacttatggtaagtccatttggccctggttattacaaaaaaaatcgccttaatcatttcaaaccatacctgcactcagagaaacaatccaagttctagaataccatgaaatatggagtctctcggaagaaaagttaccgtgtttggctcaaaccttacaggtgttgaaactcaagcattctcaatcaactgcatatctgacatcatttcaacatcaacatgagtttctcatgcattcaatcaattctactcatgcattatgcagtccatgcatcttatgtcatcaagctaatctagagaaatctgtccatcattgagtacattcgcttcttaatctgaaaacttttgtgtgctgcttattttaaattccaatatatatatatatatatatatatatatttttaaaagcgtatgcataacataccattcccagatttatatgttgctgtccccagcaaacacaacaaggaattgatgcttcaaactataatattgacggaaacaaattctaaatctaactaaactaacgattattcatgaacaaattaagtcggaaagctagactgaatactgcatgctgtatataatgtagagtaattaaaaagtctatgcataaaatactgtgcaaagctaggtaaatcacactccataaacaggatcataatcagaaacataaacataaacataaacggaatcctggtgtctctatgcgccctctccatccatagtagtagcaacatcagcaactgcagactctggaatcactggctgagtgctcggaatagtaacgacctcagctgtgactactggatcggtgaccaaaggatctgctggaggggggatactggatgtctgatatgctgaaggaggaatacccagatgctggcaaatagctccaagcatacgagcatgatgatctagctggtccctcacaaagtcctgaaaagctataaaagatgtagagtcagcaaaaataggctcctgagtgggaatatgtgctgaggatggtgatgtagcggccactggtggtgaatgtggtggtgaaactggctgtggctggactggtatctctggtatgggaaaatctcgaggtgaacaatggcgagctcctctggcttgagcttagaagctcgaaggatctgctcatccgcagcagatgccatggcatccatataactcttatgtaataagatcgtagaaatcggaacatccatgggctcctcctcgtcaatgtggacgcccgcatgtcggcaaagaagaagaatgagagaagagtgagctaaccaggacttactgctgacgtcctgaatcatatgaagaatcctcctggaaagaaggcatgagataataaggttaccctcacccctgaggatatacagtagaatagcacgctctacattcacatcagtcatatttgtagaaggtatgactgtgtgattaatgaactgatgccaaaacaaagcatctcccactaaatcatgtttccgcaacttctctggaatgtaatcaagcccagatttgggcttccaggaagtataaagactagtgatggccctgcggataatagtggcaagttcaggaacgtcgtccctgtacatcttcgtcaatgcatcgggctgcatgcgaaggaaaagctgataaaactcacagctctcaaagggatcataggctgtgtccaaaatttgctcgatggtacggtcatcaaaagagacctggacacccctcacccacgacaccctagtccgagacactgtatcatggtccacattcgccagaaattccttcaaaatcgtgctggagctcggcgcaggaaaactaactaacttctgccaccgacgacgaactataacctctctcactggattatcttccggaagagtctcccacatgatcttcttctccaaaataatcttcttcgggagataccatgactcgaacttctcctggcatgctggagtcctgaatcgatgctcatcaaaatctggagctctgggtcgtttcctgcttccttcaccagtggtctttttcttaccactagctacttgcttaccctgcagcagttaacattgaagcatgattcccagatttattatgcaaacagtacccatcatgctaacatcacgaattcatcaccagtaatgcaaggtagtatgaatttctgtctagtcatgcatgtgataaaataagtcataaaagcacagcataatgcattgaattattaattgagaataccatattcaattcccagatttagaacctttggtacagaattaaatcaataatatggctcaattgaaaaacacattgtaattcaccataatttccacttttactcaacagtatccaattatatgacaatcacaggacatctgatgaacatgcttcccagtcattcaggttctcttgttatgtcaaaacttctgatgcaatacttattcaataaaaacattcaacacctctgttccatgcttgcaagtcatttccctattacccctatattcctttgtaatgttcattcctagatttactagtgatcatgtacataaaatgtaattcaacttaagtatcatctatcttgaatcaattcaagcatttgaactacaatccagattctataaggctaaatacaattatgtcattgcaaaatagttagctcacacacaatcactttgcttccagaattagaattagattttatcaattagaatactaattacttacatatgtagttacctacatgccaatcaccagatataatctgcaagttgataaatgtattcttccatttaacactttttaattcacaatatcagtaaccaagccattatcacagcacattccaattgattccatctaaccagtaaatcctcagtgtaaatcaaactctatatgcaacatattgttaatacaatcactcaacatcttgattccagatttttcatcagatcactcaaatagcatcagtgtactttggaaattagattgctatcagcacaaatttacctcagaaaattcatgacagctttttctagcaatttctattcccagattttggtttttttgttatactccattaaagctatattaatctcttaaccaaaattaatttttaatatctggtaatcatttacatttagtcaagagattgtgttttggcttaattctaattaaacattgacaggccaatcatgataatgatcaaaatgatgcaacttggttcttttcatggcatagctttcacatctcattgatcatatctacagcccaattccatttaatagtgtatcattatcagccttcccatatgtttttcttctttccagcattgaatcaaacatgtggaatgcaattctaaaagtgaaccatttaagtatgttgggcttatgctcaaaaccaaaatttttaccatcaaaaccacagacaacagaatcgcaatcagaacagcagtatcatcagtattatgaagaagacataagactatactaagatggtgttctcaccttaagattatcaaaagccctaaagcacttagtctatgactttgattcgaaatatactactgcaatacatgacctaatcaattgaatataacagttgaaataacttcgtaccttatccttcaccatgatgctctgcgcgaaaagataatcgaacgtgaaatgactatgaatgttgaatgcgattcactaaacaagcattcacgaatgtggaattctgctgtagctttgaggaatttgcagtaatgggaattgagagagtgagagagtttggaaaagagaagaggaaagtttcgggaccagagagaaatgaactcaaaggcggttcattttaatttaaaaactcttcgcgcgacctcacgctaactacgtgagagtcgacgctaatcgcgtgaaggtatactgaaggggcatgaaactcgaatgactcacgctaaccgcgctgacatccacgttatcagcgcggaatgatgcagacaaaatgcttaaatctgtcaaacttcacgcgactgacgcgatgttcacgcgatcagcgtgaatcgacgcaatccgcgtggtattcgatgctatcagcgcggattcacccaaattttccttttgtctcgaccatacaacgctaccggcgctgtaatccacgcgaattgcgtggataagtcgaaagggtggcgcgaaccgcgtggtcgatgacgcgaatcgcgcgacatgctctgcacagaaaatttttctgaagttcaattgcacatttttggctttttcaagaacctaaactcatggatcctgactatattactctaaacctacactaaacatagaagtaaactattaaattctaacacaattttaaaactgatcctaattgaaatacaaaataaatgtaacctcgaaataagcaaacatacttcactagggaaaatacagattaagctaacatttaaaactaaaaactaaggtatgtacattaccaggcttatttaacgtcttagctagacgcttttagcgttttaaacttcaatggtattgagtggaacagaatttgaagttctgaccacttctccgaagtaatgctttaaccggtaaccatttaccttgaatgctcggtcattatccagaggtgaaatcgcaattgttccatatggaaagacctcacgaactagaaatggtcccgaccatcttgatttcagcttacctggaaaaagcctcaaacgagaattgtacaacaaaacttgttgaccaggtaaaaactctttagttcggatttgattatcatgccacttctttgtcttttctttataaatgcgagcattttcataagcagctagtctaaattcatctaattcatttaattgaagcaatcgtttttcattagccttagtcaattcaaaattcaaaaacttagttgcccaaagtgctttatgctcaagttcaattgggagatgacaagccttaccatataccagttgaaagggagacataccaataggtgttttgaatgcggttcggtatgcccataatgcatcgtctagctttttcgaccaatcttttcttgaagttccgactgtcttctcaagaattcgtttcagctcacgattagagatttccacttgtccactcgtttgtggatgatatggagttgctaccttgtgcttgactccatattttgctaataagctatcaaattgcttattgcaaaagtgagttcctccatcacttatgatagctcttggcactccaaatctcgtgaaaatattcttccttaaaaatgaaaccaccaccttggcatcgttggtaggtaaagcaactgcttctacccactttgacacgtaatctacagcaaccaaaatgtattggtttgagaatgacttagggaatggtcccataaagtcaaccccccatacatcaaaaagttcaacctcttggatattgttcaagggcatttcatctcttcttgacacattgcctaccctttgacaattatcacaattcgttacaaaatcctttgagtctttaaacaacgttggccaatagtagccacattgcaatactttgtgtgcagttcgattggctccaaagtgacccccatagttagacgagtgacaatgccatagaatggttgctacttcactctcagttatgcatctacgaatcacattatcagcacattgaaagtataagtaagggttgtcccataaatacctcttagcatcatgcaaaaatttttttctctgctgccaactaagttcctctggtataactcctgcagccttgaaatttgccatgctagcaaaccatggagtagaattgacagctagcacttgctcatccggaaaagactcattgattttcacttccggtccctcttgtaagtcttttgcttgaattctcgacaagtgatcagccaccttattctctactccagctttgtctctgatttctaaatcaaattcctgcaacaacaacatccaacgcaacaaacgcggtttggcatcttgtttatgcaacaagaattttatggccgcatggtcagtatacacaatcactttagatcctaccaaataagatcgaaacttgtctaatgaatacacaactgctagcatctctttctcagtagtagcataattaatttgtgcctcattaagtatcttactagcataataaatcacatgcaactttttctctttcctctgtcctaacactgctcctattgcaaagtcactagcatcacacataatttcaaaaggtaagctccaatctggagctattaaaactggtgcagtagtgagtttgtgctttaaagtgttgaatgcattaagacaagaagtatcaaatacaaactccgattctttctctagcaattgacttaagggctttgctatcttggaaaaatccttgatgaatctccgatagaaacctgcatgtcctaaaaagctgcgaacaccactcacattaatgggagggggtaaattttcaatcaaaataagttttgccctatcaacttccattctcatttcagatattttatggcctaaaactataccttcccttaccataaaatggcatttttcccaatttaacactagattcgtttcttgacatcttttaagtactttagctaaattggttagacattaattaaaacaaggtccgaaaacagagaaatcatccatgaatacctcaagccctctttctaccatatcagagaaaattgaaagcatgcatctctgaaatgtggccggtgcattgcataagccgaatggcatcctacggtaagcgaacaccccgaatggacaagtgaaggctgtcttttcttgatcttctggagctactggaatctggttatatccagaatatccatccaggaaacaataataatcatgtccagcaagtctctcaagcatctgatccataaacggaagtgggaaatggtctttgcgggtagcatcatttaatctccgataatccacacacattctccatcccgttatcgtccttgaaggaattaattcattcttttcattctgaataactgtcattcctcccttctttggaacaacttgaactgggctgacccatggtgtgtcagaaattggatatatcatcccagcatccaacagtttgactacttcttttctcacgacctctttcatgattggatttaaccttctttgaggctgtcttaccggttttacatcggcctccatcaaaatcttatgagtgcaaaaggatggatttatacccctaaggtctgaaatagaccatccaagagctgatttgtgatccttaagtactttgattaatctcacctcctcatgccaatctagacctttgttgataataactggataagtgtcatcttcaccaaggaaaacatattttaagtgctctggaaggtcttttagctccaccttaggtgctccggaagaaatatctccctctttcatttccagcttctctaacaatgatgttgatgaatgttctgcacatctattctcattttcagcccccgattttgctactatcttatagtccactgcagtatttccttcacctttatattctgccatcttgtccgctattgtgcaactttcttcatcatcaaatactgcagatatatcttccaatttttcactcttcatggcttctaaatctgctgttattcctgcacaaatagcattatccactacatccatcctaaaacaatcttggttgtcagttggatgtttcatggcatcaaatacgttaaacactacagattcatcattcaatcttagttcaagtttcccttgttcgacatctattaaagctctagctgtagctaaaaatgatctccctaatagtagaggaatttcgctttccccttccatatcaagtacaataaaatcagcagggaatatgaatttctctacctttactagtacatcttcaataacaccggaaggtgttcttatggacctatccgctaattgtaaagatactctagtcggtttcaattcagttatgcctaatgacttgcacagagataatggcatcaaattaatgctagcccctaaatcacataaagctctccctatattaatattacctattgctatagggatattaaaacttccaggatccttcaatttaggaggtagtttcctttgaattatagcactacattcttcagtaagctttatggtttcacattcttgtaatttatgtttcttagagagaagttctttcataaattttgcataattaggcatgttagctaatgcttctgcaaatggtatattaatatgcaatttcttaaacatttctaagaacctggcaaattgttgtttctgcacttgttgcttcgttagcaccggatacggaggcttttcaaatcttgaaaaatcccacttcttaggttgaggtgcaacttttgattcttcaactttttcttcagctgtctccttctccgttttatctactgcagaatttccaacttccttctttttgcttgtttcatgttttgctggtgtatctagtactttgccacttcttgttgtaatggctttggcatgctctcttggattcacaattgtgtcgcttggaaattgatcttgaggtctttcagctacttgctttgcaagctgtccaatttggttctccaagtttctgatggaagcatcttgatttgtccgatgagctcttgtttcagcaatgaaatcagcggtggtctttgacagttgcatcaccactttctcaagctctgaaggttccttgtgtggtataggagggggttgtaagtagttgttagacttataatctaatcctcctccttggaatcttctttgatatgtgtttccagctgcataattggtgtttctttgataaggttgctgctgaaatggttgttgttgttgcctttgatcgttccaaacaccgttcacttgtaccggatcagctccaacgaggataggacaggtgtttgattcatgcttgccttggcaatattcgcaaacaatgtttggctgacttgttcccacatgtgctgcagaagcttgcaatctatctatcttctcattcaacttggctaactgttgtgccaaaatcttttgttcagcaagcatcgcatcattagtggtcaattgaataggttccctctttggctgaagtctaggactttcattttcattccttgcaagagaactaatcaactcatatgtttgtgcaacagtcttggatcttatggttccaccagctgcaacattcactatcatccgtgtctcaggagtcatgccattgaaaaatatcctgacttgcttacctacaggcatgtcatactgtggacacctcctgattaactcttggaacctcttccaggcattacataaagattctcttccatcttgagtgaaattggtgatttcattcaccaatctgttgtacttctccattgaaaagtactcagcaaaaaatctggagactaaatcttcccaagtctctatactattagaggtctgacaattcaaccacctcaaagcatttcctttaaccgcgaatggaaaaagacttaatctcacagcatcatccgggaccccttggtgcctaattgtatcacagattctcaagaatctatcaataaaatcgtgcggatcctcaaaatcctcccctccaaactgactacgctccaccaatactatcaaggacggatttatatcaaaatgattagcattgatttgcggcctcacaatactggaggtgggtcttgtgaacatcggagctaagatatcctccatcagttcatcttccggtcttagcctcggaggcatacgatttccttcctcagccatttcgtcttcttttgattctaactcagggataaaatcaaaagtttctacttcttgtctccttcgggcagctagtcttcttctgagtgttcgttcaatttcaggatcgaactgcaactcttcaaaatcaactaaccctcgcataaacttcaagaagcaattagtaacagaaaatttcaatcacaaaagctacaaaattactgtgaaataatgtttcaatccccggcaacggcgccaaaaacttggtgtctgattaatgctaatgtgtttttacggcaagtgcaccgatcgttatcaagtaataaagtgtaagtaaagtatcgtctccacagggattgagattaatttcacaggaatttaactattatgattgaaattacaagcgcagaatgcaaaaacagaattgttgttggttttgtttgagtaattaaataagataagaaagtaagaaatatcaatagctaattgcttatgagaattaccaatggagaatgaattgtggtcaggtgcattccactatgattacttctcttcacttgattggttgattgtcattaatgaatacaaatgataagcctctcctacaattgtaaatcctagataactagcgatttcactctttaatccgatcgagaaccctaaacgtttagcgattctgtcaaattaagctttaagagaacaaatcataagaggttcatgcgttgattgctcagcactaagcctttcctaaattagctaacacctaattccttagtgaaatagccctctaatctgagttgaaaacctaatcccttagtggattctatcagattaagcattcgaaagatcctattctagcactgcagctccgcatccctattcctaggcgatgaacaactgttaccctaattcagttccgaaattagaaccccaacgttatcaagtaataaagtgctccagaagtcacagctgaggtcgttactattccgagcactcagccagtgattccagagtctgcagttgctgatgttgctactactatggatggagagggcgcatagtgtaacaccccggacgtgctaacattaatgataccaaaccacgctaaaagcgttgtacatgcggtgtgcggaagcgacaagatcgtttttcttgattacattatgtatgaattttcaaacacaactaaagcataaaacagacagaactgatccagataaaacatacacaacataggcagatacatactatacaaatatactcaggagaaaacataacctataccatctgacaattgtacatatacatgctcaaaaacatgaccacaggcggtcatttataatatgtacagaaatcgggtgtacacacacaccctgcctccaaccgacctaaaccagctcccactctggaagttctgcaccggtcttcaactgcagcctcctccagcctgatatcttcactaggcctcctgccctaaggtcgcttctctgctccagcagaagcacctgaaaaccacaaaccccaaacagggtgagacatacgtctcagtaagctcagggtcctgggaaacctccctcaccctgattcaccaccaagacataagaaataaacatagaaaagagctagagatatattctcagctcatccccatactcccagccatctgggatcacaacatgagatgcccaaggcatctgaggtctacacctctcactggctcctagagccatctctcaggggtctaaaccatgcccctggtccagccatctaactctggctttcgcagcctgtctcctagaggtacattaacatcagtgtcactcactggacactgtatccatcagagacacatcgtctcctactaaacatataatgcctgaggactattactcaggacttcatatatccagatatggctcatctaagaggctctaggctcttctcccccttgagaagccctctcttagagatacaacatatctgtcactaactggcctgggaaacagatccaggactttctaccatctgcctgggaagtcatctcactacggaggcaccatcctcaggacttaaacccacatgcctaagagagttcatctcacacaggaggcacacgtctcttaggttcctacactggcctgaggagtcatctcacaaaggaggcatcgtcactcaggactttccactactggcctgaggcgtcatctcacacaggaggcaccagcactcaggacttcactgctggcctgaggcgtcatttcacacaggaggcaccagcactcagggctttcactgcccgggaagtcatctcacaaaggaggcaccatccacagggcttctcactacctgggaagtcatctcactacggaggcaccatccacaggtcataccactacccgggaagtcatctcactacggaggcaccatccacaggtcactaccacttgcctgggaagtcattccactacgggagcaccatccacaggactttactaatccacaagtgcctgaggagtcattccacacagggagcaccatcctcaggtctttcaactcaaacgcctaaggaagaacctccacacaggttcaacagtccttaggacttactggagagccgtggcacctcccatggaataccagccgttccagggagtcctcaaacccttccactggctagggaacctcagctagcccgataccatcgcagtaccttataggttccaacactgagcacctcagtgatcatcattcacaggcccaaggccatctcacaccactcggtgtttatcctagggtttaccatttcagcccagcacacactaggccatagcatacatcataactcatagaccacatggccttcaaatccatacagcatgcccacatacatatatatacatatgttcacacaagcatggcatgcattacatcacccatcagggtggcaaacaaaggaaaagggacgaatccccagaacgatgagcttacctcttagccgtgcctcacagctctgctcctggcttgatggtctgcttcactgacactcgaagtgtcaagccctgtcaaggcacacaacatacattacagaccattcaacaacacataagctcatcaggcagtcacccctgcctcagggaaaggaatcacaatcctctccatcaacttaggtcacctgcctaaggttcctcagggtcatctcaccacaagcctttctatagaccctcagtggtctacacagatcaaccatggctttagagtcaccacagactcagcctcagccatcaaactgagcttctcagctcactcaacccctaaccacagggtttctcagggcttgaacggtctaatacactagactccgttctcttggcgtcacaggcaccaccagcccatcattcaggctctggcatgttccaaatcaagtgactcaaccacagtcacccatgcctatcctagagccaaaaccaacattctccaaatcacaaattgaaagctaatccttcctcctcacatcattctaaacacttctctcaactggacccagagctaattctagcccaatcacagatgggtcactattcacccaaaacccccaaacagaaaatcaaccggagaaactcgagtttcttacctcaatggcgacacagatgacctctggaacgttcctcctagctccggtgtccgtgggtagtcgccgttcctcctcaatctcgagttctctcaacctctctgaaggtttctcagaacttgggttttagggaatagggaggaaggattctcgctctcaagggttcctctcaagatcaaagcccatgggaaggtgtttaggccaagatatagggccctagaaagcttggggaggcctctaatggctgctggggtcgtggggaaggaggaagagggtttttccctctgaaaaacgcgaccttcgttcttataatcgctccaccgaccttcccacgcgactcgcgccgtacaccacgcgactcgcgtcatactttcggtccttccacgcgaggtacgtgagcacccacgcgactcgcgtgaacctgccgagactccgcgcgactcgcgccatacccccacgcgacccacgtgggataccagagaagaatctggttttctaagcctcatcccacgcgatccacgtcgcctgtggcgcgacccgcgccacaccctctgcagggttttctgacctgaatccccgcgctatcgcgcggggttaagcgccatcaatgagggtccttacacatagagacaccaggattcagtttatgtttatgtttatgtttctgattatgatcctgtttatggagtgtgatttacctagctttgcacagtattttatgcatagactttttacattactctacattatatacagcatgcagtattcagtctagctttccgacttaatttgttcatgaataatcgttagtttagttagatttagaattcgttttcgtcaatattatagtttgaagcatcaattccttgttgtgtttgctggggacagcaacatataaatctgggaatggtatgttatgcattccaaaatatatatataatttatatatatatatatatatatataaattatataggcataattaaaattacaacaatatgtgccacaaaataggataaacaatattttcttttattttaatatgatttatcacactattaagggcatgagtgtgagggtaaattagataaatgtaactaaaattgaataaatataccaaaacttttaattatatatttttatttaggcctattttattatattttaaaccaacaataaataataaatatatgcatgagggtattgatgtgagggtaaattagttaaaatctaagtaaaattgatcttggaaggaacaaaatctaacaaggcagagccccctcaactctacttcacagagaagatatgagaaacgtggtgccgggtcataaagatggcttggtaattaccggatccttggttaattgccaggttaaaaggatgtttgtagataatggcagttctgtggatataattctgtggaatgcatttaagaaaatgaatcttgatgaagaagacttgaaaccatccaaacaatgttaatagcattcaatggggaaaacactaacccccaaggttccattgacctcaagatgactctaggcaccaagaagacatttaagttagaacgagtcacgtttgttgtggccaactttccctcaccgtataatgttatattaaggaggccaactatccataagtaggatatgcttgtctctactaagcaccaaaagataaaaatggtggggtgcaaaaacaaagcgattataatctgcgggctagaaagaatcccgacagtgttattataacacggtcaaggatagcgacggtggtccatcctcgccaccccggatccgtcaaggagaccagaacggaaggaaggtggaggaacgcaagtcgagaaaaccagttaacatggtagaactcaacataagggatcagcactggcaaatcaccaagattggtaaggcagtcaacccggccataaaagacaaattgatggagtgcctagaaaagaatcaagatattttcacatggaaggcttcggagatactagggatagaccccaatttctgttgtcacaagttgtcaatataccccaggtcaaatcccgtggcataaaagaagaggaaactcggtccagaaaggaaacaagcattggaggaacatattaaaaagctatataatgtcatgccttttgggttgaaaaactcgggggccacataccaaagaatgattgataagtcactatttatcactatttactcatccttctgtactcattttaatccctaacttgtgcttaatcgtttatattttgcattgtttctcatttaggacttaattagaccgataattcagattttaattaatttggattattttaagtttaataattccaatttttattttcagggcagattaataattaaatgggcttggaattaatttttggacttgaagattggagtgccacgtcagcatcattttccacatcagcagctcattttcgttttattttattttagtaatttttgggctaaaattgttaggaaaagacccattcttttgtgagaggcagatactatatatttgggaaactgtgcccatgcagttataacatacacaatactattcacgctcagttttagggtttagagtatttttcgttttctgtttcttctctgtttttaggttttcgctttctgctggtgactatgctttagggtttcgttttgtttgaattttcaattccagtgactatttcgtttctgtttcaagtctcaatttcgaattcgttttctgctttcaatttcgttctctgtttatttcgtttcagttgtgtttctgttgtttcattttcagtatttaggctttcgttatgttaagtttcatttcaatttacgtttctgttgttaatttcgaattaatggaaggctaaatcctaaggttggactctaggacagattgcaaaccctttaatggaggttctctgtaattacaattcgttttctgcttgatttttccttgttggggtttctgttttgtattttttgaattagggtcatgcttaatgattctgatattgattgattcagtaatctcagtttgcttaatcctgagaacttgccctgacgaggttcacgtttgcttaattcgtgtaatgaagttttaggttaatcttcgcttagttgattaatctggactgataaggattaagtgggacagattatctttcgtgaaccaaggaaattagaggcgcaatctgttctaagggtctgacttgtttttaatcactgcaattagttgttatttctgttttaatttagattctcgcattctgccaaaaacccccccaatacacgttttcaatccctacgcagacaattgatccttgagagacgacctaggagtcacttcctagtactacatttaaattgtaataatttgattgagtacaacctcgatcaatgatgaatagagtattcgagcatcaacttggccaaattattgaagtgtacatcgatgacatgatcattaagacaaccaaccaggcttatcatatgcaggatctagaagaaacattcaacaaattaagggaatacaagattcggctaaacccgctcaagtgtgcattcggtgttccggctggagaatttttggggttcatgttgacccatagaggaatagaagctaatccagacaagtgtaaagtcgtgttggacatgaagcttccaacaaataaaaaagaggtacaacaactgacaggaagactgacggctttaacccggtttctcccgaaattggtagagaaaacacttcctttcttcaagttactcaaaaatgaggttgtagtaggttggaacctggaatgcgaagctgtgtttaaggaaataaaaaaaatgcttagcttctccacttgtactgtcaaagccaaaaccaggagatgttttaatattatacttgtccgtaggagatgaagcagtcagtgcagtgttggtgagggagacgaagaacgcccaaatgccagtttactttgtaagtaggaccctttgaaattccgagttaaggtaccaaaggttagaaaaagtagcttttgcattgctagtgacagcaaggaggtttcgcccctacttccagggccacgcaattattgtcagaaccaatcagccaattcaacgagtaatccataaaccggatttggttggaaggatgataaactgggcaatacaattgtccaaattcgatttgcggtacgaagcctggcacgctataaaatctcaagcgctgactggctttgtcatggagctaaccccgtttgatggaggaactggggacgacaccaatgtttggaaggtgtatgttgagggatcgtcaaatgtcaaaggaagtggagctgggtcatagttgagaacccaaaaggaatagtcgttgagcgatccctctagttaaacttcacaacatcaaacaaccaagcggagtatgaagtactgataaccagtttggcataggcaaaagaacaaggagctaagaagttaaaggtgcttaccgatttccaacttgtcacaggccagactaaagggcggtaccaggtgaaaaggcccttgttgacaaagtatttgaataaggtcaaagaaattatggccaaatttaatgaaattactgtcaatcacattcccaaaggggaaaactccagggttgatatcttatcaaaactggaaagtagcaagagtccgagaaatcataggactgtgatccagcaggaagtatctgaaccgagttgtgtaatgataatctcagctgctcaagattggagaaggcctatgattgattacctcgaaagaggaatcctgccagatgatgctctagaagctaagaaattggtacgtgatgttgttatgtacacaattgtggaagacaacttgtatcggaaaaggttacataccccaataatggtttgtttgaacccagatagggtagagtatgtccttaccgaaatacatgaaggaataaacgaccaccacataggggccaaagcattagcaaggaaagcccttcgggtaggctactgttggccaactatggaagttgactcaaagagtcatgttaaaaaatgtgaaagttgccaaaagcatgccaagataatatggtctccgcctatcgagttgaagtctatctcggctggcccttttttaagtggggaatggatttgttgggaccattcaaggcagcataaggatagctaaagggctgatagttgcagttgattatttcaccaagtggatagaagcggaacctatctccaccataacttcagtccgggtgcaaagattttttgaaagaaacatcatctccaggtttggtatcccggcagagatcataactgacaatggaactcagtttattgataagaggttccaagaaatgatggtcggattccagatcaagcaccatttcgctttggtagaacactcatagtcaaacaggcaagccgaagctgcaaataaagtgatcatagacgggttgaggaagcatatgcaagaggtcggttatagctgggttgagcaattgtattatgttctatggggatataggaccaccactcagacgtccactaaagaaaccccatttagactgacatacgattgtgaggcaatgattccagttgagattggtcaatcgtcttggaggagaaagaacgttcttcaggaagaagaagaaaagaaagatgaatctctagctatagaaatggacttggcggatgaagtccggatcacaacacattgctgggatctagcggcaaaacaacttgcagctgccatttataataagaaagtgaagccccggtccttcgaaaaggatgatttagtgctccgacgagcggatattggaaacaaaaacgccaaagatggaaagttagtagccaactgggaaggaccctactgggctatagagaaactcgacaagggagcctacatgttggaaaccctggatggaaagacaattaaacgaacctggaaagcggataaaccgaaagtgtattatagttaaatctggttccaaagtttcaatccaagttactacttttgctttgttaggatcaataagtcgtaaccttggcaagtagtgatttgttttcctttgttaggatttgtacattgtaattcggcaacaatgttggtctttattgagatcgtgagtcgttttatgacaagtttgcaaataattgaagcatttttgtctccattgtgatttcgcaaacaatgttgtgacttttgtctccattgtgaaacggcacacgaatatagtaaaaattttcgggtgcatgatgcataaaacttattatcgtggcaaaagaagaatatgctatttaaaccctgatcaggttgaaatgtaggaatgtttggttagaaaatcaaacttctacatgtagcaaattaatctttgttgagattaagttcaaggatgataactcggaacacgttacaaagataaaacaaaaggaatcttgcaaaataaaatgcttggtcattgaaaccaaatggatatttatgaagactgcgcaaaatatttttgattttggccaaataattcaatagaatccggtgtagtatggattcatgcgtgtgatcagaactgtaaaaagggtcaaatatgcgaagtaagtaaggaaaagataagtaaaatgattacgcaaagtgtttataaaaacgaaatcgggaacaaacccagcaatattcagtacaaattcaaaaggggctcaaaggccccaaaaaaggaaggaattacaaattaaaccgacatcccggcccttcaatactcaagctgcccggggttgagcgtggtcatcaacttgattggcagggatcacctcttcctcttcgcgactttgatctttgtccatttgagtcattgaatctttgcgaggagaagggggagagatcaacttgccatcactaactaacgccttaaagtgcataccagtggtattcagctcaatcccggggtttaaaaagttaatctactacaaggtattattgaaggatgttgaatataggggaagttgcaagaagaatcaaagcaagattgaagaagaagcttgatgattggcttaaagatatttttgctttttacatgcctaatcaagtatgaagacacgtgcaatttgtttaagtttgattcaagtacattgctttgtgatccttgcattgcaatttacatgtctcatttaacttgcatacataggtgcaatcaaacttgaaagctgttaaatgatttcaaaagaaaataagttctcatggctaagattgtggaaaagtgaaaacttactgttttaatcgattacatagtgttttaatcgactaaatgcttttgttctaaatctggaaaagccaagaagaacactttaatcgattacaagattgatttaattgattacatagtgtattttggaaaatcatacattgctgctttaatcaattacataggctttttagaaacctctgcttttctgctttaatcgattacattgcgtaataattgattattctgttcgtaatctttttccacattgataaggaacaatttaattgattatttagttattttaatcgattacatatgacaaataatcaattacactagtagattaatcgattattgtcagttaaatcagtttttttaaaagccttgtgagtcagttctttataaatagaccttgtgcaaattattcaatacacatgttgggaagaggaaaggtaacatctatgtactttcaactgagcatgcatttattctcaatacaaaatgcataatcaataaaactaatgatacttggttgtggcataggagagcaagtcacttgaacatgcatcatatgaataagctcattagaaaagacttagtaattggtttacctaagctcaaatttgagaaggataaaatatgtgatgcttgtcaaaaggggaaacaaacaaagaattgttttcaaagcaaaaatgtagtttcaactactaaaccccttaagttattgcatatggatttgtttggtccttcaagaactgtgagcctaggaggtaactactatggtcttgtcattgttgatgatttttctagatacacatggactttgttcataagaaccaagaatgaagcattcacagcatttagaaaattagccaagcctattcaaaatgtaaaaccttgcaacattgtttcaataagaagtgatcatgatagtgaattccaaaatgaaaactttgaaaaattctatgaggaatatggaatcaaccacaatttttctgctcctagaacacctcaacaaaatggtgttgtggaaagaaaaaatagatcccttgaagaaggttctagaactcttcctaataaaacaaacttgccaaaacatttttgggctgatgcagtgaacactatttgctacactttgaatagacttcttataaggcctcttttgaagaaaactccttatgagctatacaaaggaaggaagccaaacatttcacatttaagagcatttggctgcaaatgttttgtttcaaataatggtaaagaatcacttgataaatgtgatgctaaagctgatgaaggtatttttcttgattattctttataaagcaaagcatatagaatctttaataaaagaacattatgtgtagaagaatcaatgcatgtaatatgtgatgagtctaacacctctaaggaggaaaaagtatgtgatgatgatgcaggaaaattggaagatgttatgtagtttaatgaaaagataaagcttgattcaaatgacaatgtggaacattcaacacccattcaagagaaaaaggattgaagaacaactaaagatctttctcttgacactattattggggaattatcaacgggagtgtctactatatcctccctaagaaaccttaattgtacaatggcatttgtttcacaagttgaaccaaaaggcattgaccaagctttacttgatgaacattagatgatgtccattcatgaagaattaagtcaatttaagagaaaagaagtatgggaattagttcccaaaccttctcataaacctattggcaccaagtgggtttttagaaacaaacttgatgaaaatggtatcatcataaggaacaaggctaaattggttgctaaaggataaaaccaagagaaaggcattgattatgatgaaacatatgctccagttgcaagattggaggccattaggttgctacttgcttatgcatgcttaatgagttttaaattgtttcaaatggatgttaagagtactttttaaaatggatatattgaggaggagatttatgttgatcaacctcccggttcattgattttaaacatccaaatcatgttttaaaattgagaaaaacattgtatggtttgaaacaagctccaaggttttggtataaaaggttgagcaaatttctgattgaccaatctttcataagaggacaagtggacaaaaccttgttcatcaagaaaagaggaaatgatattttgattgttcaaatttatgtagatgatataatatttggttcatctaattagtctatgtgcaaggaattatctatctctatgcagagtgaatttgagatgtctatgatgggagaattgatattctttcttagacttcaagtgaagcaattgaagaatggaacatttctcagccaatcaaaatactgtttggaaatgattaagaaatttgaaatggaaaagtgaaaaaaatgttgtaactcccatggctacatcaacatatcttgacttagatgaaagaggaaaaagtgttgatgagtcaaagtacagaggaatgattggatccttgttatacttaactacaagtagaccggatataatgctaagtgtttgtttatgtgcaagatatcatgcaaatcccaaggaatctcatcttactgcagtaaaaaggatactcaaatatctcaaatccacaccaaaagttggattatggtatcctaaaggtacatcaataagtataattggatattctgattcagattttttaggatgcaaattggataggaaaagcactagtggtacatgtcacttattgggaagctcactaatttcttggcattgcaagaaacaatcatgtgtagctctttccactgctgaagctaatacatttctgctggaagctgttgtgcacaaagtctatggttgaagcaacgactacaaggctttggtgttgagctacatgagattcccttgttgtgtgacaacataagttctatcaacatttccaaaaatcctattatgcactcaaggaccaaacacattgagatcagacatcactttatcagtgatcacatccaaaagggtaatatcaaaattgagtttgttgaaactgaaaatcaattagctgatatttttaccaaacccttagcaagagatagattctattcacttagaaacatgctaggaattctagatgaatctagtgtgtgttagcatgctatttatgtgattatctacatgaaaatgaatcatatattgttcattcatttcaaatgcaatcaattgaaaaaatgctgcataattattgttcatactaataaattcactgtaataatcgattaggcctcggaataatcgattaaatggactttaaaagttgtttagaatgaattttgtgcttatttaatcgattacaggcgcaaaatagttgattattcttcattcaaattttttcaaaaattaacgttcactggaataatcgattacaacatcgaattaatggattacacaagctggaaaatcttttgaaatatcacatttcaccggaataatcgattaccacatattgtaatcgattacacttcatcttcctgaaatggatctctcactagtttaattgattacgcctcgtgttacctgttttgcttacgaattaatcgattacttaagctcgtaatcgattattcatggagttactgcaaaatcttaaagatttttggaaattgtaactgcccaactgccacctaattcaaaaatttgaatctactgagcttttatgttagtgggttaatttgaaatgacagttatactttcaaatttcaatctttggagcccaaaatcatctatatatacagtcttgctgaagaaacaaatcacaccactctcttcttacatcttaaagccttatttctctatttctcttcttcagagtctagtttatgtgctttttgttttcctactccttgtattcaccatgtctgctcctaagagatcaaaaacctctaagagaaagactgctgaaacttccaaccctatagtgagtatgttagatcattggttcctagctaagcgtgataagattaactacctataatctaatgctaccaagctcatttgccctcctaaacaccttgaccttgcatgatttgccaaagaaggtttttaattccttgctatgattgaagcccagggatttaagaaatttgttgagatgaagggtaccttttaccctgaattagtaaaggtgttttacacctgtgctacagcctccatggatgggactatcctatctcaagttaatggggtgatcatggaaatcactcttgaggtctggcaagaagttgctagcatttcctttgttggtgaaaggaaatttgaggaagaggccgagggttacaacaaagttgtaacctatagagggatgttgcttgaccctcaaatgaggctgaaattgaggcttagtactggtccaatgactcatgaagatagacttcttcattacataatcacctacatcttgacccctaggtccacaaatcatgcacaagccacagatgatgacatacaacttgtgtatggcatgaaaaactctattaaaatgaactggatcctcatccttaaggaaaccatgctgaaatccaaaagattggtgaactatccatctccatatgttgttcttgtgtctagattcattgattatttcaagataaatgtctccaataaggtggttgacaacactaatccaacaacagtctcatcaagcagaagcaccttaacaagcttggaatgctgaagacttcttatagatgacagatggctggacaacaagttcctcttgctagtgctaaagaaaatagatgaagaagaagctgaaggccctttgaatctttaatgattcagaagatggatgctttattgtctctgcaccatgagcatagggctgagacaaattcatctatggaagagatgaagtctagattagagaacatagaagctaggcttgttattaatgatactgacaaactagtttaaattgcttatgttcttgatgctttctttctgtttctgagtatgttatgctttggttaatgtttgttatttttaattttcaatgtactacatcatctttcaattaatataagttctgttttctcctctttatattctctctatgcacattatttttgtctttgataagccaaatagggggagaaataactatagtgatcatagggggagataaataagacataaatctgtttgtttaaatgaggtgaaatattttgtgatgatgaagtcctctgtttgtttgctttgtatgtttatgataaattatacaagtcagggggagcaaatttaaagcattatatacttaacacttgttttgcaaaagctgatttaaatttcaggatatcaagtataattccactatcattcatccctcaaaatcaatcaaacattaaacaaatggacaattgatatttcgcatgctcaaagccaaaaagggggagattattgaatataggggaagttgcaagaacaattaaagcaagaatgaagaagaagtttgatgattggctgaaagatacttttgctttttacatgcccaatcaagtatgaagacatgtgcaatttgtttaagtttgattcaagtacattgctttgtgatccttgtgttacaatttacatgtctcatttaacttgcatacataggtgcaataaaacttgaaagttgttaaatgatttcaaaagaaaataagttttcatggctaagtttttggaaaagtgaaaacttactctttaatcgattacacagtgttttaatcgattaaatgcttttgttctaaatctgaaaaagccatgaagaacactttaatcgatcacaagattgatttaatcgattacatagtttattttgaaaaatcatacattactgctttaatcgattaccatttatcataatcgattactttttagaaaactctgcttttctgctttttaatcgattacattgtgtaataatcgattattctgttcgtagtcttttttcagattgctgaggaataatttaatcaattattaagttattttaatcgattacatatggcaaataatcgattacactagcggattaatcgattattgtcagttaaatcagtttttttaaaagccttgtgagtcaattctttataaatagaccttgtgcaaattattcaatacacatgagtgacttaccaaaaagacaccaaactttctaagtgttcaagagactgatttccttgtgagtaacacgtcttgtgaagatcaagatttctgagttttttagagaagatgtactaaagaaaaaaagttttcaagatattgattctaagcattagaattcatactacctggattgtgtggtaatctcatttcgttttcattcattcatgcatgaaggatcacatctagtgtttagcttgaatcattttttagattttctaagagtttgttgtgttgtaatatttcaaattgattccttgtaaagcattctagagaagagatctctaggtttgaagatttgagtaggtttctcaagatctttgtgacttttattctaatagtgtttttgaattcagaatctttgtctaatgttgataaagattatcacttgctgtgcttgtacaagaataatttgatatagtgaaaactctaacctagtgttggttggaaaacactggatgtagcctccatgtgtgtgaagtgaaccagtataaattgttgtgtgattgattctttttctgaatatcttgttggatatagggggagcaacaagaagaatgaagcttatgatttagaagaaagttttgagcctttcacatgccttgaagattgtaatttaaatgaagtgtatgagaggccaatctattgatccttgcattgcatgcacataatcattaacatgcttaaatattttcattaaaatatcaaagctactcacactttgaaaaacgaattaattgagtaatgtttttggaaaaatgtaatcctattgttttaatcgaatacacagcggtttaatcgattttttggttcgtgtttaaaactggaaaaactttgatgaacatattaatcgattacacaactcttgtaatcgattacacaacattgtgaaaaatgaatgttgtgcattgctgttttaatcgattaccgttaatcgtaatcaattacataagctattttgaaaaagtttgcttcactgctttaatcgattaccataaattgtactcgattacacaagttgcttcagaaataaaacttctctgatttaattgattactgctcgggttaattgattattttgtttgttgtgaaaccgagaatggagctttgaacactttaatcgattaagtgacaatttaagcgattacataagtcattttaatccattatttggcacgtgtaatcaattacagtttgttacaaaaagctgttataaataggaagaaggcttgtcttgaaactaaacttgaatactttgaattttctgaatatacacaagttttctcaaagttagaaagtggttttctggattacataagtttgtgtcccactctttaatcttcatgggtattgaatgatttcttgggcaagagatttcaaagaagttttggagagcatggtctgaaattctttttctgcaattcaactctgattggtaactcacatgcattcatattcattggatcatcaggttgtttctctccattatctttggttgtaaatttgtttttgtgatgtttgttatttgatgctattgtaaaagggttctttgaagcttatgctagagtagggttctctagggaagaacagagtagtgttctctggttcttgttcactagaagtctgatagggttttaaatttctattctttatctagggttgataaagagagtttgttataaagcttgtaagaactggaatttataatagtggaactctaatctagttttgattagaagaaacttgatgtagcttcttttgagaagtgaaccagtataaattattgggttacttttctattccttcatctctatcagttatcttattaatttgttcttggtattattatcattactcaacaagttctgtttttagctattcatttcttgagttgagtgatttgattgattaaaagcattcttggtttaaaactgattaagatcctttaactctgattttataaataaatttttaaatactaagatcaaaccaattcacccccccccctttttggttgttgtgggtattgctattgttttcaattggtataaagagcaggttcttgagtgttattcaagatcactatctttctttaaaagaaaatgaataccacacaaattatcttcaaggaaggtgcctccctcaaccgtcctccagtgtttgaaggagaacacttcagtttttggaaaaatagaatgaaaatctttattcaatcaaatgacccaggtgcttggaatgctatagaaaaaggtcttgttattcctataaaaattgttggtaatgatatgattcccaaagaatgggatgaaatgacagatgctgaaaagagagttgttcaatatgattttaaagctaagaatatgattacttctgcacttttctctgatgaattctttagagctgttaggtgcaaaagtgcaaaggagatgtaggaaatgctggagatatctcattaaggtacagatgaagtaagaagatcaagaaaacatgccttcatccatgagtatgaaatgttcaagatgaacaccactgaaagcatatctcagcttcaaacaagattcgctcacatagttaatcatcttctaggtcttggaaagatctttgatactgaagagttgaacatcaaaatcttgaagtgtctcacaagaccatgacaaccaaaggtgacaacaatcaaagaatcaaaagatctatccaaaatgtccatggttgcactttttggtaagcttcttgagtatgaacgtgaaatatcacaactaaccaatgcaaaagatgcaaaaaaaaaacaaaaaagcatagccttgaaagctgcatcctcaaagatggaagactcaagtgaagaagatgaagaggacaacatgaatctaattgtcaaaaagttcagcaagttattgagaagagacgagaacaaaaatttcacaaagaataacaacaaaaggagtgacaacaatttcacttgctttgaatgtggtaagcctggccacattaaatctgaatgctctatctttttgaaaaagcaataaggtgaaagtaagataaagaaagaaggaaaacttaagagaacctacatagcttgggaagacaatgggtaaacaacttctgaatcatcaactgaaaaggaagaagcaaatgtgtgtctcacttccacaataaataaagatgatgaatcctcaagtgctaaaactgaggtaaattctgaatttgatcaagttgttgatgtttttcaagaaatgtatgaagagactcaaaagcttgcaaaatccaataataggctaaaaggaaatcttagatggcatgtcacaaaaattgtagaattgcaaactgagatttgtaacttgaaagaagaaaatgaaaaacttgtttcaagttacaaaatgaatggatgtgtatgtgcttcttcttcatctaatgttgacaaatacaatgatttgcaaaaatagtttgatgagttcaaaaaaagtcaaggtgaaaaacatatggtagtactttcaaaaaataagtacttggttgatctcttgaaaaggctttataaaggaaaatgcaacttggctgaaatgctaagtgtgcaaaaatatgctggagatacttctggattggttacaaacatggatcaaaaccttatgaaaaaaccaagtttgtgcatccaaaacagaaatatcaaaaatctatctcaaaactaaggtttaatcacatgaattaatttgaaagagcatcaaaaacagtaacttgtaactattgtatgaagaaaggtcacacatctaataaatgctatgctaggagattctatgtgccaaatggagaatgcatttgggtaccaaagaaaaggagaatagctaacccctatggacccaatctcaattgggtaccttcctgtataaattgatttgaattttgtaggtatgtctaagagcaagatcttcattatggtatcttgatagtggatgctctagacatatgactggtgacatatcaatggtcacaaatttgactcttaaagatggtggatttgtcacatatggagacaacaacaaagggaagataattggagaaggaaacataggagacagtttcaaaaccatgatcagaaatgttctttatgtggaaggtttaaagcacaatctcctatgtataagccaactttgtgataaaaggttcaaagtgtcatttaatgacagttgctgcatgatatgtgatggacaaaatggtgaggtgattcatataggtaagagaaaaggtaatatctatttactctccatagatcatgcattttctcacaacacttcttgcctaataggtaaaattgatgaatcttaactatggcatagaagggcaagtcacattaacatgcatcatatgaacaagctggttaaaaaggatttagtcattggcttacccaaactcaagtttgaaaatgacaaattatgtgatgcttgtcaaaaggggaaacaaacaaaaaaaaaatttcaaagtaaaaatgttgtttctacttcaagacctcttgaattacttcacatagatttgtttggtccttctagaactatgagtttaggaggtaattactatgggcttgtcattgttgatgattactctaggtttacatggctttgtttttgaaatccaagagtgatgcttttaatgcttttagaaaattggccaaacttgctcaaaatgaaaaggggagaaaaattatctcaataaaaagtgatcatagtgcagatttccaaaaatgaacatttttgaaaaattctatgaagaaaatggaattaaccacaatttttcagctggagaggaaaaatagatcccttgaagaaggtgcaagaactcttcttaatgagacaaatttgcctaaaacatttttaggctaatgctgtaagtacagtttgctaaactttgaacagaatactaataaggcctattttaaagaaagccccttatgaactatacaaaggtagaaaataaaatatttctcatttaagagtatttggttgcaagtgctttgttttaaataatggtaaagaatcacttggaaaatttgatgctaaagctgatgaagccatcttccttggatatccattagatagcaaagcatatagagtttttaataaaagaaccttgtgaatggaagaatcagtacatgttatttgtgatgaatctaatccctccaaagaggaaaagcagtgtgatattgatgcaggtcctttggaggagttcattcagcttaatgattcaatggataaagaaaaagaagaaccaattgttgaagctaaacaatcaacaccagtccaagagccaaaagattggagaactacaagagatctctctcttgacaatatcattgatgaagtttcaaagggagtatctactagatcatcattgaaaaatctctgttgtaatatggcttttgtttcacaaatagaacctaagaacattgatcaagccttaattgatgaacattggatgcatgccatgcatgatgaattgaatcaatttaagagaaatgaagtttgggaacttgttcctagaccttcttctctcaaacctattggcactaaatgggtttttagaaacaaacttgatgagagtggaatcatagtcagtaacaaagctagattggttgcaaaagttacaaccaagaggaagacattgactatgaggaaacctatgcaccggttgcaagattggaaatcattaggttattacttgcatatgcatgtttaatggattttaaactttttcaaatggatgttaaaagtgttttcttaaatatatatattgaggaggaaatctatgtggagcaacctcttggttttgtagattttaaatatccaaaccatgttttcaaacttaagaaagctctttatggtttaaaacaagctccaaggtcttggtatgagggattaagtaaatttcttcttgaacaatctttcacaagaggacatgttgataaaaccttgttcatcaaaaggtaaagcaatgatatcttattagttcaagtgtatgttgatgatataatttttggttcaaataatcaattattgtgcaatgaattttctatctctatgtagaatgagtttgaaatgtcaatgatgggggagttaacattctttcttggacttcaagtgaagcaaatgaagaatggaacatttctaaatcaaaccaagtattgccttgaagtgatcaaaaattttgaaatggataaaagcaaagatgctgcaaccccaatggcaacatcaacttatcttgattcagataaaaaggaaagaaagttgatgagtcaagatttagaggaatgattggatctttactgtatttgatagctagtagaccagatattatgtttagtgtgtgcttgtgtgcaagatatcaagcaaatccaaaagaatctcacctcactacagtcaaaaggattctcaaatatctcaaatcaacaccaaaagttggtctttggtatcctaaaggtgcatcacttaatttagtgggatattctgattctgactttgcagggtgcaaattggatagaaaaaacactagtaaaacttgtcacctactaggcaactcactaatatcttgacattgcaagaagcaatcttgtgttgttttatcaacagctgaagttgagtatatctctgctgaaagttattgtgctcaaaatctttggttaaaacaacaattgcaagatttgggtgtagagttaaaagaaatacctctgctatgtgacaacacaagttccatcaacatttccaagaatccaataatgcactcaaggaccaaacacattgagataagacatcacttccttagagatcacatccaaaaaggtttactgatttacttcaatacagatgtctctaatgaggttgttaacaacacaaactccatcaatagcctcatcaaagagaaacatcttatcaagcttgggatggtcaagacccctcatggatggcaaatggctggccaaaaaatctttgctgctggaaatgaagaagaagctgaagatgaaggccctgctcaaccatcttacagtccatttgaatcacttatgattcaaaagatggatgcctcattttccctacatcatgagcacaggactgagactaattcatctttggaagggataaaatctaggctagaaaacatagaagctaggcttgtcgttgatgattttgataaactagcttaggtttcttgtatttcctcttaatgctttactctgtttttttttcttttctttgattaatgtattattgtctttccctctccattaatgaaattttactttctccttctcattatttgctatgctatctttttgtctttgataagccaaatagagggagaaaaattgattgatatccaaatatcaaacaaactctgttttgttctctgttctgctctattttttgttgtgtttttacaaattaaaaactaacgaagttatctaagtcagggggagcaaactaagtcagggtgagcaaactaatgaaagtaaatgattaatgtttatgcaagcatatctcttaacacttgttcttggcaaagaggctgatttgttttcaggttaacaaagttcaagacttctattgtcatccctcaaagtacttcaaaaattaaacacatggtcaatcaaatatttggcatgttcaaagccaaaaagggggagattgttggatgtagggggagcaacaagaaaaatgcagcttatgatttagaagaaagttttgatcttttcacatgccttgaagattgtaattcaaatgaagtgtatgagaggccaatcttttgatccttgcattgcatgcacataatcattaacatgcttaaatgttttcattaaaatatcaaagctactcacactttgaaaaaggaattaattgagtaatgtttttggaaaaatgtaatcctactattttaatcgattacatagcggtttaatcgattatttggttcgtgtttaaaactggaaaagctttgatgaaacatattaatcaattacacaacttttgtaattgataacatagtgaaaaatgaatgttgtgcattgatgttttaatcgattaccgttaatcgtaatcaattacataagctattttgaaaaagtttgcttcactgctttaatcgattaccataaattgtaatcgattacacaagttgcttctgaaataaaacttatctgatttaatcgattactgcttgggttaatcgattattttgttcgttgtgaaacccagaatggagctttgaatactttaatcaattaagtgacaatttaatcaattacgtaagtcattttaatcgattatttggtgcgtgtaatcgattacagtctgttacccaaaactgttataaataggaagaaggcttgtcttgaaactaaacttgaatacttcgaattttttgaatatacacaagccttctcaaagttagaaagtgattttctggattacataagttcgtgtcccactctttaatcttcatgggtattgaatgatttcttgggcaagagatttcaaagaagttttggagagcatggtctgaaattctttttctgcaattcaactctgattggtaactcatatgcattcatattcattggatcatcaggttgtttctctccattatctttggttgtaaatttgttttgtagtgtttgttatttgatgctgttgtaaaatggttctttgaagcttatgctagagtagggttctctagggaagaacagagtagtgtactctggttcttgttcactagaagtctaatagggttttagatttctattctttatctagggttgataaagagagtttgttataaagtttgtaagaactggaatttataatggtggaactctaatctagtgttgattagaagaaactacatgtaccttcttttgagaagtgaactagtataaattcttgggttacttttctattccttcatctctatcagttatcttattaatttgttctgggtattattatcattactcaacaagttctgttttgagctattgatttcttgagctgtgtgatttgattgattaaaaccattcttggtttaaaagtgattatgatcctttaactctgattttataaataaatttttaaatactaagatcaaaccaattcacccccctcttggttattgtgggtattcctattgttttcatatcttttattactattgtttggaaatcaatatacaattaacaagaaatatttcagttattacatgcatttcaaggtgatattaaattgaaagaaaaatctgtttttgattaagggtgattgagtgatacgatcgaagttttaaattctgcaaattgttttcatgaaaagttttttaaaggtattcttaaccaattcacccccttcttggttatttgaagtgtgttcatagtattttcaaaggaccctttcacggttgcggatagctgagctctcacattagtagcatccatctttgcatacgccagctccgcctcaatctgcttgtgtgtcttctctagcttctcaaacaacacgttcaaatctttaaaaaatttcgtggtggtggcatttaattttcgtagagaattcacatcagactttgtctttgcagtagtgttctgagccacaaggagttcttcatgggtctttttggtctcttcccgagatgcttaaagctcattaaatgttttgatatacatggtcttcacagtcgccaaactctaaaccagggatgagcatttcatggcactcagctctatgaggttcttgaatctcagcatcggaaaagggaaccagatccgtgaagtgcttgggtgcttgaacaacgcggaagagttcttcgctaatacccttctcccaaagggatccaggtaagggttgcacaggaagaagaggtatttggagttggttcaacagcaggggcccggggtgagatgaccactagagtagatgtcgaagccttctccttttgggattctgaaagctttcgcttccttgacccagggccaatagccgcggaacctttccctaaatctagaatggtaagaaaaggacgggattgaggtcgtcgtggctgcttcgatgtgattgggtggccagaggtcgaagtgggggcgtttgctttacaggacaaggagccggggtttgctttcctggaccagcagccagggtttgctttcccagaccggaagccggagttgaggaggacgctggttgctttcccatgtcggaaattgcaaaataaaaatgaaggaaccgttaaaacacgcaaagtcatgtataataaataaagatggatatgatcatactcaattgtgcgggaaacccagattgaggtttacgaataaaggaagcaacgttaggatgactgtgagcttccttataagcagctatctgggtcaccgagaaagaatcagaatctgacaaattcgtttctttgaaacgataggaggaaggaggaaaatcatggcgggtatgggaccaatagagtggaaatttccactctacgtccctagactcaacagaacaaaggaaaaatggttgcttgtcgggttcggcaacaactttgaagtacttgtttttaaaatttttacaaaatctgtatatacatgaaagagcttacgctcagtgagatcccgaatagatgtccatcctttcctattcgggggttccctacctgtcctactagtttggacaataaaataataaaagaaaagaggaacgatactggggatgtctaaatgctgacaaaaatgttagaaagcgtttatgaaaccccaactgttcagatgaagttgtgagggagccagatgaaggtgatttaaaatactcatttgaaattcaaataagggaaattggacccctatccaggtaattacatctttgtagaaaaagaaaaaaagaagggttattcccctctctacaagaacagataggctcgtccttatcggacggacgaacgttaaaactctcctgattcccaacaggaagtgcgacaacgtcctccgaatctagcttggacaacatatacagtacttcatgggttacccacgagaacttggaaatcattgaaggggaaggggagttagagtacgatccaacagattgggactcggcaactcgttccaatgatgacaggtccataaatatctacgtcaaagaaataaaaatcaataaagcagtaacatacctgaagaaagatagtgttggttggaaggagagtttgttggactagaggtatcattcgagataaggatgatgaccttagattcgtcaatattcttggcaaaatcaggaggactacccggcacaaaaagggtactacttgtcttagcaagactcggtttaaggacaaggaccgggttgtgacgacaagacccaagcagcgattcagccatggagcagcagccggattctacaagttgggcgctttcataaacacagtcgaaacacaggtcgaaccgagtttctagggtaggttttgaggtaaggataacactaccttgggccaaagaagattccgggcactgcagttcaaaacctggagacaaaggggaagaacatatagaggaagccctagtgtcaaatcaaacgttagtcttgtctaaaagaaatttgttttcaagaactctaattttcgttgttatatcaaccccaccaatatgtgagcgaaatagagtcttttccctttcttcttcagaaaggaaaaccaaataaccaatacccaacctagggggaatggtttggcgtaatcttgcctcttcttcgggagaaatgttcattttaaacgatgatatagaaattttgcaagaaaactgtatgaagaattgaaatattcgcagccaaaaaacaaaacccagaaaatgacccaagatagaaatcaactcaagaggaactcacaaactacaatcgaaataaaagcgacatcaagaagtttaatgatagtgaggatacttgcttctgcgacgattttctaaagcttaagtgacgaaatgcggagaagggtagaaatgagggctcagaaaatgtaaagagatacacagaaagaagaagcaaaatgcaaatgaaaatgaagtaaatgaaaatatagggggacgctagtgtaatcgtcagacgcgtgcaaagcttcacgtctgagggaaaaccatcagatgcatgcaaagtgtaaccgtcggatgagtgctaagcgtcacgtttgagggcaaataagacaaatcaattcaaaatttcatcaatagcgcacatggtgaaacgacatagcattaaatgcacacaaatatcaaaggagtaaaaaagaatgtctatagtgtgctacgactagcaataagatagctgtgaaaacaacttcaagaaagatgctcctcattccaaatgaaagatacatggagccctggcgactatccaaatctggggggatcaacatatatgcagtactcggatatgaacagttaggacaaaaataaagaaaaacccgacttatacgaaaaatagggatcaaccatctctactagggatgatcatataaatcaatgttagaaaaaggagcaaatagacaagccagttggggaaatggtgtgcgcaaaacagaactcgtcagaactggagaatgggattgtatcaattaatacaccctgactgcctagaagtctcaacaatcaggctggagggcaattgttacggacccaacatatggacctaataaggcgttccattacaatgaggcccgctaagggtccattagctcagaatctcaacaacacgcattacagccatcggaagagatcccaacaaacggatatcctaatcccaacaattagagattctagcctatcaaatcgagatgtggcagtaattaacctataggtaacacccttataataagatgtacgctcacatgtatatgcagtctctctggactctattatttgccgtcactgtgcacacacctcaccctcattagttaaaagtcgtctcagtatcaagtacatagtgatctacttaacctaggaatatttcttctataaatactttggagagtctttgatctaatattaacctactaattatccagctagacacccctatttataaaatcagaacaaattgaatataataaaatagcatgatcttaaaacgggtttcttcacgatttatttataagactcaaaatttaggacgttgcaattcacctacataaaattatgaaccgaactgtgatgttctaacaataaaagtctataaacttgttgaaaatcgcgtgataggtgaatctaactagcaactaaaaattaaaaaatttaatattagtttttttgttgtcgaagagattcactttttacacgattttatgtttatcgttcttttttattctagcatcaattgaattccatgtaagacaatatgatgagatacgatttacatctcaaaattgaaaaatgataaaggttttgaaatgactattttaattcactttaaaatataaatattaattttttttaaaaaataaaagatcaaaccgattataattcaataataatcaactaaaaatgtattttagcaatttaaatattacaagagaaaaatttgtagtttcttaaacaaaacaagaaaataaaaggtaagtttatttaaacttattttaataaaattaattttttgtttttcttataaaactacttttgttttaaaaaaaatattattattttacttattttgggaaacaaattctatctatttgttaaaaaaacattatttaaagtacttattttaattttttttagaaattaaaaaaatcagccaaaaatatcaattatatttcttttctcctacttgagcagctaagggggaaagttcctgtatcacgtgtcacacactatagtccaaatgaaatcaagtgaggcaatctatagtacaaacccatccatccccaccaaaccatatcatcattatttctttcatatccccttcaattttgtttccacagtacaggccaccattttttctcactattacaacacccacttttaacgtcgtctcttttaagtcggttgtaagaaaatcgacttgttaggtaggtcagtggcaattttgtaaataattgaattgattttgcatttcgaagtcggtttttttttaaccgtcgttgtataagcctcaacaaagtcggtttctataataaccgactttgaaagatttacatattttttttaaaaagaaatttaacttcatttttgtttttttttttttttgaaaaactagattccaagttggttatttaaaaaaccgacttgaaaagctcatacaccgtttttcttttttctttttcttttttcttttttttttgaaatattagattccaagttggttatttaaaaaaccgacttgaaaagcccctacaccgttttttttattttttattttttgaaaaattagattccaagtcgggttatttaaaaaaccgacttggaaagcccctacaccgtttttttttattttttttgaaaaattagattccaagtcggttatttaaaaaaaccgacttggaaagcccctacaccgtttttttattttattttttattttttgaaaaattagattccaagtcggttatttaaaaaaccgacttggaaaacccatacaccgtcttttttttatttttatttttttgaaatattagattccaagtcggttatttaaaaaaccgacttggaaagcccctacaccgttttttttttatttttttttgaaatattagattccaagtcggttatttaaaaaaccgacttggaaagcccctacaccgttttttttattttttttttgaaaaattagattccaagtcggttatttaaaaaaccgacttggaaagcccctacaccgtttttttttttttgaaaaattagattccaagtcggttatttaaaaaaccgacttggaaagcccatacaccgttttttttttttgaaatatgggattcaaaatcggttatttcaaataaccgactttaaaaaggccattttcgcttttcccgtagccattctcgctcagcgccaatttgaaactcaaatttcaatttgaatttcgaatttgaaattccaacaaccttataattttcaaccttacgttctctctttcacattaaaaatcaaacctccttccttccttctctctctttctctctttgtcttctacgcttcgtttttcctttcttcgtcgattctactccgccgttgcgtcgttaccaccgcaccaccaccgctttggctttaggctgttcgcttttgcatcttcttcctctcctcttctgcttttgtctggtaatttctcatttcttctctctttctcctctctcaccttcaaccatcgtattccttctcccgttttttctctcatttcttttttaaatgtttgtaaacatgtgttattgagtgaaatcttatagaggccatgtgttgtttgaagattcgtgaaatttgataatattttaggtgttgtatgaattgtaaagaaatgagttgaattgtatattatgttgatgctaagaaaatggtttataaaatgtgttgtttgaacccgcagcagcagaagaaacaaaatcgaaccactataaccttccgatttcgcgattcaggttcggtcccgtacgatatttttttaaaaaaaaaatatgacattctaagtctgttatttaaaacaaccgacttagaatgttctttttttttggaatattagattcaaagtcggttatttaaaaaaaccgactttgaaagccatacattgatttttttttttatttttttttgaaaaattagattccaagtcggttatttaaaaaatcgactttgaaagcccatacaccgttttttttttttttgaaaaattagattccaagtcggttatttaaaaaaccgacttgaaaagcccatacactgtttttttttttttgaaatatgacattcaaagtcggttatttaaaaaaccgactttgtatatatcagtttctaagtcggtttttttaaataaccgacttagaaaagactatttttaaaaaaaataaaaaaaaaaaaaaatttcaaagtcagtccttataaaaccgacgttgtttgctaacatttttaacgtcgtcggagacaagatcggttcgaaaaccgactttgtatggtccaaataaccgatcttgaatatcttttatgtagtagtgtctttctttctcttataaactcactccctctctctctcatgctcccttactcataaactcattcatggcaatggccacggttcacaagtggctcactcatttctccgacaccaaaaaatgcagcaacatcctcgtacctcttggttccaagggacagcaatccatgtacttactccactatcatgtaatgaaacaaactactataatctcttacctatgtttcttatctttgattttagaatttggattggcgtgtaatccaatatgaaatactttcttttttccatattattcttcaaatgggggggtttggaaaactttgttctccacaacccaaacacacgtcttatgacaacactaaaaaaaaaatgaatctttagagttgtttcttccacgtgttaaaagtttatttccagatcgaaatgtaaacttaaggaatgtgatatttttatgtttgttatgagttttgaaaatttattattgagtacggttgattacggataaattagtaatattatgttttatttcatttctctctctcgataaaggggtgagaaaatgatttctaaccggaaggtgaaaagttatttttaagaaaaatattctaacacccttttgaattactcaaaaataatattttgagtgaagaagtttagttcagttgtttgaatgataatgtatgaattattataaatttttcaacactatcttcgttttttatgaattaaaaaaataacttttcttaattataataattcttagaatgtcattgagtgtgaaattatattccgatacaaatgttacctatgtttgctttttatgatttgagaaacttatgtgcttgggatgctgttttttgtttttaatcattttattgatatataatatccattgatttttgttgattattaatcttgtaagaaaaatttggctaattcactttaatgttattgataccattggaatgcagtgtttcaatgaaaaaccacacatttttgtttataagcaaataatctatattaaaaataaccgtcctagcaacacaagatatcttgtagcaacacactaaaactgattaattaatcctatgtttatgtcttattttttaatttgtttagagacccgtgcatcatagatgctacctttcaatgaacggttgcagagagggacaacaccaacatgcaagaccaaggaacaaccctgctgggaccatagaaaccagaaccttggcaccagttgcatcacctgcaatggctatgtacagcctcaacatggtcatttcggatcttaaatcggaggctccgttcggtacctcttcgggcattgtaagggtgcaggttccaattgaagagcaagttgaagccattgattggctccattcgcagaaccatcttctacttcctcgctgcttcttctttggaaggaaacagtgcagtagtccctgctgcattaatggtgaagaaaagttggtcagtcttgctggggtgggttcagctgttttcttttcccagccacatccattttcatattgggattggatatctataagaaggtaatttgattttggatcctttcaaaaaattaagatgttactcttccgtttctaattaaaagattttttcaactaattcaggttaattaagaataatagttaatttaattaatcatattaatgtttttaattatttgtactatcattttaaaattatatttttttatttattattttatttaattattttttattaatgtttgaaaaaaaaataattaaataaaaatatatagaaaaaataattaatatatttttctagaggtagggaagaatttctccaagaatcttcgcttcatgtctgtccaagttgtgataggatccaattgaaggtataatcagtccttagcaacaccatccagagagaactatcttaatataatcctcatggatatcatgtgggcgcatggtggaacacaccacatgaaactccttaaggtgcttatgtggatcctcaccagcaagtgcatgaaatttaggaagtaaatggatcaggccagatttcagctcataactgacttcagcctcagggtattgaatacaccaaggttggtaaacaacatcatgtgtagctaactccttaagagttaggttgttatcaaccatgatatcaagatgtgtagaagcagattcagaatcaaagtcagaagatacaacactactgtctaaaactacactatcaaagtcatctaagtcatctaacctagggttatgtctgtgcaatctgtgaaatgtcctatctatctcaggatcaagtgaatataattcacttgatgtggacctagtcatacacagttcagatcataaggaacaataaacacagacaacacagaaatatcaaacagctaagctaccaggacactaccaactatatatgctgaaatgaaatagaaattgtaaaactgccctaacaatttttgaaaaaatctaaaaaaataacagtgaatgcctaaaaatcatgattgatttttgtgattttttttgtgatttttaaaaatcatgaaattagaaaattgcctaaaaagtgattttccgcaccttctggtaaaatttcagccaattccgagatagtttgctgtgaaattaccagaatgcccatgcgtcaattataaaaactagtccaaaactcctacttagagttcgaatttgccaatttgaacccacacccaactccaaaaggggttgcttttgtttaaaatggaggataaaccttggggaacaaatcgcaactcaaactgcacaagttggaaaaattttggtacaacaaaatgacactacaaaaacaactacactacactactttctccctactactactctgttttttgctctgttttttcactgtttactctgttttttggcagcacacatcaactacatcaactacatcaactctacttcataatgcacaacaacaacaatgcaaatatgtgacaaaatgaaattatgcaacagaataccaatatgcagtgaatgtatgcaaatgattttatatatataactactactatgaactatttacagcaaattaaagctagcacacaataaaccgtgtccccggcaacggcgccagttttgataaacacgttgtcgacaagcaccaaaacaattttactaagttatttctgtagcacagagctaacctaggtcgactcagagacacaatcaatatggttttagcttcaatttacgaataacagtaagggggaattttatcaaacagtttgtgcacgtaagtaaaatttgcaaaaacgtaaactaaaattaaagagcaacacagaaattaacaagattatcaacaagtgagtaaaacagattagagaagcatcaatccaattcaccaaaccaagcaattcgaatcatcatcattctcaaaaatttatcctatcatgaacattcattcaatctcattagaagttgttcaatcgaattaacccctaacttgattgaaaccacaaccctaattgaaatatcatccaattattctgtgattaatattcgaaattaggcatgaatccataacctaatctgctttcaatcctaaacgcattcataatcatgaaaaatagaatagcaattgaagaagaagatgaacattcacataggattcgaaatactaaaccagaactcaaattctccttgtgcttgggttggattcttgaattgattgaggatttagccttccatgatcatcgtcagtgaaagccccatggattgagtgcacgaaaatggaagaacaaaaaaacaaaaatgaagaacaaagaagaacagtagagagaaaatgagagcaagggttttgatctaaaaactaaaggaaagaaaaataaaacttgtttattgaaatgtaaagagtggtgcccaagtttcactaaagtcactaatatgtagtgactgagttctgaaaaggaaatgggccataaacaaacccaacaatctaattatttgctatttgttgcgcgatttatgctaatgtatatacggcaagtgcaccgatcgtttaacaagtaataaagtgtaagtaaagtatcgtctccacagggattggaaagatttcgtagtaattatgaaaattatgattgaacaagaaacagaaatttacgcaaaagtagttggaagtttgtgtggaattgagaatgaaaattaaacaaaatagtaaaagtaaaatcgagaaattaccaatgagaaataattgtggtcaggcacaatcccttataagtattacctccttcaattgactgattattttaacttgaagtttacataagatcaatctctcctatattcgtgaatcctagaactactagagtcataaccagtgattcaaccctttaattcgatcgagaaccctaaccttctagcgattctgtcaaactaagaattcaaagaacaaatcttatgggttcgtgttatgtttattcggagaataagtcttttctattttagttaatccctaatgtcttagtgaactaaccctttaaactgagtttgtaacctaatgtcttagtgaaactagtcagttcaagcaattgaagaacatattataacccccgcactcatgcatccctatgtctaggtgaagaacaagtgttaatcttaacaggtcagatattataattccaacgtgtccattgcgaagtataactctcaatactcattcagagtgatcaattctaaacaagattatgattaagcacagaaaagaattaaaataaacaaaacatatgcatttaataccagtcaatttacagagggaaactcataagttcatggcctttccacaacaagatgattagctagccataggcctcaagaacaccaaagcaattggatgaaacatgattctgcagaactttgattccaatcttgattcctaggtttttccttcaataaactctctaatctatgtgtggttgtatctccaaggctaagtctgtgtaagtgtctccaaaaaattcagaaaacacccatatttatcgagtattttaattacagtaacttatcaaaagctttttcctattttcgaaccaaatatcttttaattcaggaaagaaaagcacggacacgcgacccgcgcgcgacaccacgcgactcgcgtgggttggcagtagggattggcgcgacgcgcgtggaatctgaagtaggtcgcgtggatggtcagagttaaattacttatttcttgaagtactgacgcgacccgcgtgggttcccaagtgcgtcgcgtgaacaagcagtgaagaattggcttaaacctgaaggtctccacgcgatacacgtgaaatatggcgcttctcgcgtgatctcttctggacattcaagtgaaccgcgtggattttggcgcgatgcgcgtgaggctccagactttgtttccttctttatttgctcttaaatttcctctttttggcctgcaaatgctcaattggtattaaaatgccttatgtaacacaaaatattaactatgcctaatttctaaagctattttctaactattcaatacaattatgacctaaaactaagctattattaagatgtgtttgcaacacatcactatttacaacaatgaaagtcaaattcgcagcccaaaattacaagtgaagaggcacaaacttcaaagcttaaaatgaccctctaaatgacagaattggcctcaggctatttcaagtaaacttgtagatcttttcgttatctttccagggactcctagaacgctccattcggagatcagtagctccctataggtcttgcacaagtcagatacgtcaagtgagccaaaaatccgaaaatacgcgacaattagcaattaagcccacttacttgcctaggcccaaaaatggaattagaataggaaaataaaggtccaagagaggtcaaataagataagaatgatagaaaaatactcaactaaaagcactctatcatacccctcgatgtggggtggtatttgccaggctcgctggtggaaggataaggtgctacttttgaggctttttatatagcacactaatgagcttgcttcttgtctgccttgacagtaactatttctcttgtcaaggtcgggaatttcatctttaggtgaggtgtggagacgatagttccgatcttgttcaatgttttcctgccaattaaagcaaaataaaaagtctcggtatcgaagattagatacctgatagtgaaactcctcaagagtggcctttgccaaaagtatgtaacctctggtttctacctcttcccctacaaagccgaagaggggtccagggtgagggtggatggtgtctggtgaaacttcgagcctcatgaaagtcttccaatataggatgtccatggaactaccctgatcaatgaggacttttagtaccataaagttagcaatcacgacagagatcactataggatcatcctggttaacaaggttgatgcccttaaagtctctgtttgtaaatgtaataggaggaagactccttggtgatggaacatcgatgtagttaatgtcgatgtcccgaatagcatgaaggtgccattttcgggactggctagacgatcctccataggagaatctgcccacaatggtgttgatcacacctcgaatttgctaggtgggttcatttaccctttcttgtggaggttgagcctcgcgtctgggttggaattgcctttgcctccctttatcttctgctctatctcttcttctgtcagcatcctgatttatgggttcatcctcccggtatgcttcgggtctagttcctattgggtgattatcgagtctttttacaaaccaggataaatatccagcttgtataagcttctagattttttctttcagaccccagcattcttcagtgttatgaccgctattgcggtgatatctatagtatttgttttgatacatccttggcttgaggggcagtggtggtagtagtttcacctgtaccttgtgttgaaggcttcctccatgatggttacacggttgattgtcaagggtgtgtagcactcatacctgggtccttttgggagaggttggagcttgtccggcttgtgctttttgtccaacctgtgtgggtcggtcttggttgctccttcttgcttgtcttgcttatgtccagcttgtctgacctcattttggaacttggacatttcttccatctggatatagcccttggctcgttcacgtaattcgtccatgctagaaggtggtttcttgcatagactgtccacgaacttgcctagacgcagggctaacatcataaaatgcagtgcaagctcgagaatgaggttccaaatttggatgattatttgtccaaattgatccatgaatctttgaagaggctcattgtctgcctatcatagactggctagtgcagtagaggtcagtctatggaactgggtggtcgtatactgtgcactgaatttttcaacaagggtgtcgaaactgtcgatggaccttagaagaagtccatcataccatgtcaaggatgctcctttgagagatgtagggaacacacgacacaatactgcatcgtcattggtgtatagattagcttaggtgagttatgcttctaggtactcgtcaagattagtggtgccatcatactgctctacgtggagaggtttccaacttgaggatagatcaacctccatgatacaataaacaaagggatgtctacgtgttgtccgccctcctagacggtatatttgtgataggttggaattgtactgagggtcaacagtgtgttgggggtgtgattacccttgagtatgctcgttccctatgagaggcgaatgcttgtcaccttggggcatctcactctagcttccaactgatcatgatcagccttcatccttcagagctcttcttcatggcgtcgtttgattaagtgtttttagttaaatatttttctatttttctatttttcttagcttatttgacttatcttggacttttattttctcattctaattcagtttttgtcttaggcaaccaagtgggcttaattgctaattgttgcttattttcggattttttgctcacttgacgtatcttcctcgtataggacctacagagctctacagaactctgaatggagcatatgggtaatccttggaaagataaggaaaagatctacaagtttgttgcacataagccgaggccaattctgtcatttggagggtcattttaggctttgaagtcagaatcactacacttgaattttgggttgcgagttggatttttattggtgtaaaaaacataattaattagaatagatgggcctatttatggtccattatttacatctgagcaatgtgaatctagagtaatcatctacaataacaagtccatagtaattaccacctaaactcatagttcttgaaggaccaaacaaattaatgtgcaatagttcaagtggtcttgaggtggaatgtttttattatgaaaagagattttggtttgtttccccttttgacatgcatcacataatttgtccttctcaaatttgagttttggtagaccaataactaagtccttcttaatgagtttattcatatgatgcatattaatacggctagctctcctatgccacaaccatgtttcatctaacttactcattaagcatgtggtcttgtgaaaaaatgcatggtctatagaaagcaagtaaatgttacctttccttttgccaatatgaattacctctccattcttgccatcacaaattatgcagcaatcttgattgaagcaaattttatagcctttgtcacataattgacttatactaagtagattgtgcttcaagccttcagcatagagtacattgcttatttttgtattcaagctatcaccaatgcttccttcacctatgatctttcctttgttgttgtctccataagtaacatagcccccatctttaagttcatgctttcttcatcttcctcttcacttgagttttcatctttttccaccttgggtgctgcagtttttagtgctattcctttgccttttctttctgcatcttcaccaaaggttagttgagataatttaaactcatacccaagcaacttaccaaagagggcagccatggtcatttttgaaagatctttagattccttgatggatgtcacttttggttgccatgctctagtgaggcacttcaagattttgatgttcaattcttcagcatcaaatgtcttcccaagtcccaagagatgattcactatatgtgtgaatcttgtttggagttgagaaatactttcattttgattcatcttaaacatctcatattcatgtatcaatgagtgctttcttgatctcctcacttcctcggttccttcatgggtgatctctagcatctcccacatctctttggcacttgtacatctaatagttctgaagaattcatcagaagaaagagcagaggttatcatgttcttagctttaaaatcatactgaacaattcttttttttccatcatcattcatctcatcccaatctttgtgaatcatgttattatcaaccaccttgatgggcaccctaggacccttttctattgcattccatgctcttggatcattggattaaataaagatcttcatcctatttttccaaaaactgaaatgctccccctcaaacaaaggaggtctgtttaaggatacaccttccttgaaggtgaagtattcatttttgaaaaaaaatgatcttgagtaacatacaagacctagctcttgatgccaattgtaaaatatgggaacacttcacacttaaccaagaggggggtgaattggttaggcttggtaattaaaaaattttcttgatcaaaatcagtgttttgcccttttggatctttatcactttagaaaccaagaacccttattcaatccaaagttcaacccaaaatatgtagtacctcaagaatttggttgataacaagagctcagaagcaagaaagataaaatatagcaaatagatagaatatgaacaacacaaagatttatactggttcacttcaaacactatgaagctacatccagttttcttccactcaacactagaatggagttccactattgtaaatttcagttcttacaagttattacaaagcttctctttatcaaccctagataaagtttagaaatctaaaacactattagattcttagagacaacccactgagaacactactcaacaattctcctagagaaactctatctctagattacaagcaagaaacttatttacaatagacaatccaaaaccaaaatcaaaacataattacaacttcaaagattaaggaaagaagtcacctgatgatccaatgaacaatatgcatatgaatgatttcaccaggtagaagaatgattttaaccttagaacatcactttcctcaagctttgaaaaagaaaatcttgcttcactaatccctcaaagacccataaatgttttgtgaaagcaagaactcaatgaacccagaaaaaccactacaagaatgtttagaaagccttagaatgctcagtgtacaaattgatcgagttagtgaaaaagttgagcatgggttctatttataattagctttctaaccgtcagtaatcgattacatacgctcctgtaatcgattaattcgcatatgtaatcgattatttcaagactgtaatcgattaaactattcaatagatgttctgggtttgagcaacgaacagaataatcggttatcccgtctggtaatcgattaagacaacaagctcctatttttgaaatacattatgtaatcgattacggattttgataatcgattaagtcaggaggcttcataaaacaatttgtactatgtaatcgattactacatttggtaatcggttaatgcagcataacatgttgattataggcatatactgtaatcgattactatctgtcataatcgattaagacagagagatgatatttcctatttagcctaagtaatcgattactaattgttggtaatcgattaaagtatttaatgtatcagtttatatgaaattataggtaaaataatcgattaatccgatatgtaatcgattacattgttcttgaaatgttttccagaaggcacaaagaacaaaataatcgattcttatgatagtgtaatcgattaaatcagtaagaacttatttttccaaaaacttagatttaaacttgcctaatttaccaaatgcttgtatatattaaaactcaatttgattaactaaatgaatgatatgaatgctatgcacatggatcatcagaaaatacttcttccttttacattaatcacaaattgatcaccaaagcttcaaagcatgttgaaagcacaaaaccaagcttgatccaatgttcattcttcaagtgattcctctcttaaatcaacaatctccccctttttggctttaaacatgccaaatcttcagttgattaagcagtaaggcttggagtttaattatttgtatcaatttgaagaacctcaagcttttcaaacctgaaaaattttcaatgcttttgccaagaacaagtgttaaaaccatttgtgatccaaatatcattcatttagcaatcatatgtattagttggcttcctttgatcataacaactccccctaaatatagcattcattcaattcaattttttaacacaaaatgaaccagaaaataggggcaaacagagtataatccagagtatacttaatcaaacaatactcctcattaatcaaacatttctccccctatttggcttgttaaaagtcaaaaatagataagggacaacggataatgaatgaaaaccattagattgaaacatggaaagccaatacaaatggagaattgaaagtgttcatagtttaaaaaaaaacataaaaactaaaaactgaaaacaaacaacataaatttaaaattctacagaggcattgtcattcatatttgcttctattgagtctaatctctccctaatatcctttaaagcctcatgagtttcagccttgaaatcctcttggatttttagcatagtgttcatcttctccaacatcaaggactcaaacttagagtaagcaggctgttgaggctgcctttcctcatcttttgaatcagcagccacttgatcttcaacagcagtagcagcttgggcagccataatccatccatctggagttttccttgtaacgcctctatttaccctctcgtgattggtttattttagataaaatattgtgttcactttgtattggaatcaaattagttataaatttttcacgaaaatcttttttctctttgcttgcaagttttgtgtaatttatttgtaacaaaagcgactttccctcaccacgatccatataattatagtcctttaatacaaatgaaattattaaacagtccaggtacaatcccaaataattcatcaccaaatagattacaaacagcttagtacagacagcgcaacaccaaatacagatcaaagtatagatcatcaaaaacagaaaatcatcacacaagcttcatcatatcttctcgtacatcgtccatatcattaattctctgctcgcccaaataaattggggtcatcacaggtgtcaaccaccgaaacaaataggggtaagtacatgataaacaaaatttaaatataaacagacataaatatacgtaaagagttaaataataatacagaggatttatttaatacgtttactaaaaatttaattattatttcctcaacacatgtattaaatcatcttttttcttcacacacactcgtcatgaaatgaaagaaaatgcatgctcatcttattatctgatgcatgaccgagatctcagcttctcaacgtctcaataattgtggccactatcagataaccccaccctccctcagtggaacgaacttatccatcctgtcagggtagcccagtggcgcgtaggattatcacatccatccatgtgatcatcatggtggtgtggtcctcactgtctcaactacccccaagttaaaacacgtatggactcagtttagttatctgacacacctcttcatgaggttcatcgtctcatcgtctcaattttttaccccaccgggtatatgcacatgcatgaatggttcattttacatcttttaattattcttgtctcatcactttcatctcaaactcaatcatcatcaacatggttctcaaatcaacatcatcacatagtttaaatcatttcccattatcatgataaatcatgtatagatactcttttcatctaatttttctcattattcatcactttatcatctttctaagcacacccatatttattcttctcaaacacgtcaagtaaatattattaacaaatgaatcaagttgttcatctttttgttcatcatgtcccacatcaagtttcacacaaatataacaccacatcctctcttcattcaatcttggtcccaaaactttatcttaattccatacttaaacaatgatgatatttacttaattaagttccaagcacaatatatttcaacatgttttaaagttatcatcgagacaaataaatagattaaaagagtatttaagattcaagaaacactacaactaaacaaagtaactaattagaagattatctaaagcaaataattagaaaataattaaacaacaaaatatgtaatttaaacgaatatggaaacaacaagatacatggttagaaaaataagtaacattataagataaacttacttaagaaacatatatactatctataaccaaaataattcatgaaacataattctaatcctttagacatcaagttagagatttataaattacttaggattgagtttagattattcatctttaagctaaagccttattcacaaagcttgattctttttccattatcccaaattatcaactcaaatcttcattaatctaggtagtaactttaagtagaggttcatatttaaatttagtttaccacaacttccccatacctcaaatgttggccaaactcaagcaagttccctcccttggtccttcttcacgtggacttccttggccttttggaatgtttttctttggtgaaagtgatagcaagagatggtatatggtgggtatggatggtggcttatgtttttgacttaaaaaaaacttagaacaaaaccaactagtggggcataaggttgcacggctgcttccttcttttaggctgacccaaaattgttccctcccacttccttttatagcaaaatagcaaagtcaaggctgtaacaccccatatttctccatgtctgtgtattttcttataaatacgcatttctagataaatgacataaatgcccttggatatttttgaaaatgaccaaaatgtccttggataatttcacaaataacatttaggtccctagggtaaaagaccaaaatgccctgaacaattgtccaaatgactaacatacccttatagctctggttaggtcagatagacttagtaatgtcctagaaacctaataccaacgtagaatggtcttaaacaaagaattattgatatttttagtaaagaaaaaccttgagatagaatttttaagaattttgaaagatcactcataaaagattaaaaataaatcaatctaagttccataaggacacagagaaaggaaagacataatctagaaatttcctcttaattatgaaatgaatgaagtactaaataaatagtctagatattttaataaattaaaaacaaaatgaaccaatagaaatttagaaaaagttattagaaggaaattaggagacaatgatggtttaaggaaatttttattgaagaaaatttcctcttaacttctttggacacggaggaagttatagttattatttcaaaaatcccaatggtcaaaaattagatatatgagttaggattataccattaaaattttaagaagatccaacggttaataagttcagaatgaaaatttttgtaacacgggtttttggcagaatttttaggactaaaactaaactattccacggtttttactccaaaaatcctagaatgaccatgcaatttcgtgaaaagagtagaagacttgagaataatcaaggtttaagacacttgtaaggttaaaaactaaaaagcatgtcattagaccatttggaaagctaggtaattatgaaacttgaaaatgatgcaacaaaatctactatagataagcctacatgtcaaatgaataaaaagcaaaggaaatacacctccttattgaagctacacgtgcagccctaggtggcaaaggaaaagtgtagaaatctcatgaaataagacacttgtgcggaggagaaacactagccaataaaaagaaaccaaatcaaaagcaaggtaataatgagcttgagatttttcctaaaagccaaagaacttggcctataaaaagggtagtggggaccaaatggatgctagttcacggtttgcatctcattttcaccaccatccctttcaacttattcctttcccaaaaacaaaagccaaaacaaagtgtcacaaccttggaagttcacgtgggaagcctagggttcttgaagcaaggtagcttaatttcaaataaggaaaagcaaaggtatgggaagtattatggtatacatgcttagataattaattatgttatgtcatcctttaattctataagattttaactaggttgtgatttatttccataaaccttaaagctttgtacaccaagtgtttgtaaaaatgcctcaaagaagtaaaagaatacctaagtgataagtaatcctaaataacttaagaaataaataacttaaatataggctagtaggaaagtggctaggaaactcaaatctctacattttatgtgttaaagttatgtgttgcttgttatatggttatatgttacttatttgataataacatgttgcttgttaggttgttgttgtatgttactcacttgaaaatgaatctttctttgtacaaagattgtttaatgattatttgatgtgattattgttatatactatttattataaggtgcactttaatttggattaaagctatatgtaataaaatttaagatattgaaaatggtggaatacgtatactaaaggaaattgtggtgcacttacacttctatatatggacttgatcatgatgggagaataaaaccttttggtgccaaagttataagaatctgataaataaaggagtaactgaaaaaaataaaaaatgaatccatgcatcatttacacttgttccctcagagtggaggaggtttcactagagtgggtgaaactattttatggtaccttgttacccctcagagtggagggaggttccactagagtgggtggaactatttgagtatacccctcagagtggagggaggtttcactagagtgggtgaaactattataattctggtacctctttataggattctgagatctcagtcatgcatcatgataataaaagaaaacatgcatcattcatcacatatctattttacaattgttattttgtttcacttatttatctgttcctgttaattatccaatcatgtttatcatgtacttacccgagttgtgtctgtggttgacacctgtgatgaccccaattactttgggcgagcagaagaacagtgagctaaggaaattattaaggaaggagctggatgttctatgtgctgctggatgttctatataatgtgttcgtgactttttgtttgtctgcatttatactactatgagctgtatgtatcttatgttgtaacaggctatttgagactatattgtacttggactatatcttaatttatgtttgaaccttgtagtttaataaattttgcaaactcgttagaaaaataaccgattacgtataattaatgttaattaaacaaaattacgtagaaaatttttatgtaaattaaaaagcgtaataagttacatacgaataaattaattaaaagcgaacatgatacgtagtcgttgtaacaaataacatagtcgttataaaggcagctcacaccttccctcattgcacggatggagataagtccaatgggattttctacttgcattaatggaagattccttccttatcccttgcatttatggtttattcctttggtccccccccaatcattccctagcttgacacttgtttcattctcctttcttgcttttgaatttgccccccttccattttttttttcataaccgtagcatcctatcttggtgcaaaaatgttgccttttgtttatttttcttcaagattcgtattaatacaatactcattccgaattcgttcaccattggattttcttagaattttaaagggatacttctaacccacatatctaacttttgaccgttgggatcgtggaaataatgtctctacctgtctacgtattttaccaaagaagacaacataagatttttctttaattatcttttacgcattaattactttcttattggtccgtttcacttttaattaaaattactaatttaacttaataaattagtctatttatctcataattaggagaaaactccaaagattatgactatcctttccatacacttttctgatacttaagatagcctgaattgagctctattccaaaatatgtattaaaattcatataaatcctattgtatggtttcttatcacctaattagttaatcattggtcatttaaaggtattctattccatactcaggttcccacaaaatttctaaaatcatctgggcatttttgaccaaaaagggtattttgataatttcaccacttaccctaggggcaaaatggtcatttccaaaaatgttcaaggtatctctgtatgtatcaccctaagggtattctgatcattttccaactatccaagagtatttataaaatgtcctccttcaaatatcttgttagaatacctaggggcaatttggtcatttcaaaatatctagtggtattttcgtccttttccctaatttcttctgtactgtctctagttaatgtcttaccccaataattgactgtgattccaaaattttggggtgttacattccccatgcccatctttgtgaggttcttctccttgatgaggctgttggaggagttggtattatcaaccacttcattttcaacatctatgttgaagtggtcaataaaccttgagaccagcacaggatggggaaaggggtagttaactaatctctttgatttgagcataatctcctcaaagatcagtacccagttcatgggtatgttgttcttcagcccatagaccaattgaaggtcttcatctgttgcttgggcatgatttgtggcccttggtgtgactacataagtgataatgtagcgtaaaagtttatcctcaggagtcatgggtccagtgcctaatctactcctaagtctcatgtgtggatcatagagcatctccctataggtgtccatcttgctatagccatctggttcttcatcgaacctcctagccccctcacacactactgcagccacagactcccaaatatctggagtaatcttcattgtcactcccttgactttggacatcatatccccttgcatagagcctttcaaacaggtgtaaaacactttcactaaatcagggtagaaggtaccctgcatctctagaaatcttcttagaccttgggcttcaaagaaagctgggaattggaacccttgcctaataaaccaacctagttcaaggtatttgggggaggctactggtttagtggcattaaactgtagatagttcattttatcagactctgtggaaaaccacatgtcgagtctgtttggtggctgaggtggtggtggattggaagaggattcaccagccttccttttggatgttctaactctcttaggagtgggatttgacatggcttaggatagcagtttgagacacagaaaaaatgcagaaaacagagaggattcagagaaggttgcaagtgattttgatgaagcattgtacttatttataggcaccaaatagacttccaacgtccataattttgaaaaatctagctgttggtgatagttaatggccttgggtttgcttttaacttgaattgggcagttacattttttagaaaaaaaactgtcagaacacgtgcaacaacatgaataatcgattatttctttaagtaatcgattattccaatacaaataggacacaaaatttacacacagtaatcgattattccttatggtaatcgattacagacctatcagatagaggtagaagatgacatgtaatcaattatattccaatgtaatcgattatatacatagacttgggaattattcaagtatcagagctttgtgtaatcgattactctagagagaccattaatcctaaacttaagtgtaatcgattacaagcttccagtaatcgattattccagtgagacacatagttataaaatgaattttgatcaatgtaatcgattatcccgttgtgtaatcgattattgcagtgaagcataatttctgaaatatgaaaaataatcgattaccaacttgtcgtaatcgattacttgagtacaatttgcacactaaaagtgatttttaatgattttaatcgattaacctgtagtgtaatcgattattccagtcaatgtatcagaaacagagtatttttacaacttgatacgaactttcaatcattcaatgataaatgtggcattgatgcttttatttgtcataagaatcatgcatcaaacaagctagtttatgttactttcatcaagaatgcctagcatgtttctaagtgtataaaatctatcttttggcaaaggcttaatgaatatattagcaagttgattatgggtatcaatgaattctaccttgatgttacctttctgcacatgatctcttatgaaatgatgtctaatctcaatgtgcttggtccttgattgcatgacaggattctttgaaatatttatagcacttgtgttatcacaaagcaatggtatctcctttagttcaactccataatcttgcaattgttgcttgagccatagactttgtgcacagcaagttccagctgaaatatacttagcttctgcagttgacaaagctacacaaacttgtttcttgcaatgccatgaaatgagtgagcttccatggagatgacaagttccactagtgcttttcctatcaagcttgcatcctgcaaaatcagaattagaatatccaacaatatgtattgatgcacctttaagataccatagcccaactttgggtgttgccttaaggtatttgatgatcctctacattactgtaagatgtgactcttttggattagcttggtatcttgcacacaagcaaatactaagcataatgtctggtctactagttgtcaaatacaataaagatccaatcattcctctatatttggattcatctaccttcttccctttttcatctgaatcaaggtatgtagaagttgccataggagttgtagcatctttgcttttctccatttcaaacttcttaattacttcaaggcaatactttgattgattgaggaaagttccatccttcatttgtttgacttaaaatcctagaaagaatgttaattcccccatcatagacatctcaaactcactttgaatagctgccgaaaattctttacaaagcttttgattagttgaaccaaaaataatatcatcaacatatatttgaaccaataggatctcatccttgtgccttttgatgaacaaggttttatcaacattgcctcttacaaaataatgatcaagtaggaacttactcaatctttcataccatgatcttcgagcttgtttcagaccatagagggcctttttaagtttaaaaacataattaggatgcttaaaatcagaaaaacctggaggttgttcaacatatatgtccttctctatgtaaccattcaaaaatgcacttttgacatccatttgaaaaagtttgaaacccattatgcatgcatatgcaagtaatagcctaatagcttctaatcttgctactggagcaaaattttcctcatattcaatgccttcctcttggttgtaacctttagcaaccaatctaaccttatttcgaactatgattccactttcatcgagtttgtttctaaaaacccactttgtaccaataggcttgactgatgaaggtcttggaacaagttcccaaccttcatttattttaaattgattcagttcatcatgcatgacatgcatctaatgttcatcttgcaaggcatgattaatatcttttggttcaatttgagatacaaaggtcatgtcacaacataaatttctaagagagaatctagtagagactccctttgatacttcaccaatgatattgtctagtgagaggtctcttgtggttctccactctttaggcctttggttgggtgttgatggaccttcttcagcattaggttcattcttctcattgatagacagtttttcaagctaaacattttgctctatttgacctgcatcttcatcacaatctttttcctcttttgaggggttagattcatcacaaattacatggacaaattcttctatacacatggttcttttgttgaaaactctatatgctttaccttgcaatgaatatccaagaaatatggcttcatcagtctttgcatcaaattttcctagtgattcttttccattgtttaaaacaaaacacttgcagccaaaagttctcaaatgagaaatattgggctttcttcctttgtataactcataaggtgttttcttcaatatgggtcttatgagtaatctatttaatgtgtagcaaacagtacttactgcatcagcccaaaaatattttggtaaatttgtctcatttagaagtgttctagcaccttcaagtgatctgtttttcctcttcacaacaccattttgttggagtgttcttggagctgaaaagttgtagttaatttcattttcctcacagaatttttcaaaatgttcattttggaattctccaccatgatcacttctaattgagataattttacaatctttctcattttgaacaagtttggtgatagagtactttaagttgagtatttttctatccttcttagcttatttgacctctcttggacctttattttcctattctaattcagtttttggcctaggcaagtaagtgggcttaattgctaattgttgcgtatttttagatttttgactcacttgatgtatctgacttgtgcaggacctatagggtgctaccgatctccgaatggagcattctaggattccttggaaagataacaaaaagatctacaagtttactagaaatagcccaaggccaactctatcatttagagggtcattttaagctttgaagttagcacctctgcacttgtaattttgggctgcgaatttgactttcatggttgtaaatagcaaataattagattgttgggtttgtttgtggcccattttattttcagaactcagtcactacatatattagtgactttagtgaaacttggagagcacacttttcattttaataaaacagttttacatttttctcttttaggtttttaggatcaaaactcttgctctcattttctccctgctgttcttccttgttcttcattttcgttttttctgttcttccattttcgtgcactcaatccatgtggctttcattgatgatgatcatggaaggctaaatcaccaatcaatccaaggaaccaacccaagcacaaggagaattggagttctggtttagtatttcgaattctacttgaatgttcatcttcttcttcaattgctattctgtttttcataattatgaatgcgtttaggattgaaagcggattaggttatggattcatgcctaatttcgaatattaatcacagaataattggatgatatttcaattagggtttttcaattaaattaggggttaattcgattgaacaacttctaatgagattgaatgaatgttcatgataggataaatttctgagaatgatgatgattcgaattgcttggtttggtgaattggatttatgcttctctaatctattttactcacttgtttataatcttgttaatttctgcaccgttctttaattttagtttacgtttttgcaagttttccttacgcacacaaactgtttgataaaactcctcactcactgttattcgtacattgaagttagaaccatattgatcgtgtctctgagtcgaccaaggttatctttgtgctacaaaattagcttagtaaaattattttggtgcgtgtcgacaacgcgttatcatttggctaattttctaaaagaatggaaagcatcactcttgtatttcaaaaacaacgtccatgtgaatttagagtaatcatctacaataacaagtccatagtaattaccacctaaactcatagttcttgaatgaccaaacaaattaatgtgcaatagttcaagtggtcttgaggtggaatgtttttattatgaaaagagattttggtttgtttccccttttgacatgcatcacataatttgtccttctcaaattttagttttggtagaccaataactaagtccttcttaatgagtttattcatatgatgcatattaatacggctagctatcctatgccacaaccatgtttcatctaacttactcattaagcatgtggtcttgtgaaaaaatgcatggtctatagaaagcaagtaaatgttacctttccttttgccaatatgaattacctctccattctttccatcacaaattatgtagcaatcttgattgaagcaaattttatagcctttgtcacataattgacttatactaagtatattgtgcttcaagccttcaacatagagtacattgctgatttttgtattcaagctatcaccaatgcttccttcacctatgatctttcctttgttgttgtctccataagtaacatagcccccatctttaagagtaagattttttagcaaggacttgtcaccggtcatatgtcttaagcatccactatcaagataccataaagaagagcttgctctaagacacacctacaaaaggaacaaattacttcaaaggagaaggtacccatttgattttgggtccaagtgggttagctgtttgctttttcttttctatccaaatgcactcaccatttgggacataaaatcttcttgtaaaactttggtaagatgtatgacctttttccatacaatagtgacaaatcacagccttatatgagtttccaaagaacctattttgattgaatcttggtttcttctttttcttttgttttggaggtataaatgttgtcttttgaacatttttaaaactctttttataccccaaaccagaagtgtcaccaaactatttttgagcactcaacatttcattcaaatcacattttcctttgttgagtttttccaagatatcaatcaactctttgttatttgaaacaacctgcaagtatttttcttcttgattcaatctatattcatcaaaactttttgcagcatttcatatttgtcacttgatgtagaggaagaggtacaaatacaaccacttgatttgtagcttgaagtaagtttctcattttcttccttcaagttacaaacttcagtttgtaattccattatttttgcaagatgatcctcaatacttttcttaagcttgttgttggatttagcaagctttttggcctctttgtgcatttcttgaaaagaaaaaatagcttgatcaagttcagaagttatctcatcatcttcatccaaaagatcatcatttacttcattaacaattgaggtgaggcacatgttggcttcttctaattcagtggaggatcacaagttgaggattcattgtcctcccaagcaatgtaggctcttcttggctttgtttccctcttgcctttgctgtcactttgttgtttcttcaagtagattgaacattctgattttatgtggctaggtttaccacattcaaagcatgtaaagttgttgtcaatcttcttggagttgctagtgttgttgttggtagaattgttcttgttgtttcttgtaaatcttttgcccttgttcttctttagaaacttgctgaactttttcacaattaagttcatgctttcttcatcttcctcttcacttgtgttttcatctttttccaccttgggtgctgcagtttttagtgctattcctttgccttttctttctgcatcttcagcaaaggttagttgagataattcaaactcatactcaagtaacttaccaaagagggcagccatggtcatttttgaaagatctttagattccttgatggctgtcacttttggttgccatgctctagtgaggcacttcaagattttgatgttcaattcttcagcatcaaatgtcttcccaagtcccaagagatgattcactatatgtgtgaatcttgtttggagttgagaaatactttcattttgattcatcttaaacatctcatattcatgtatcaatgagtgctttcttgatctcctcacttcctcagttccttcatgggtgatctctagcatctcccacatctctttggcacttgtacatctaacagttctgaagaattcatcagaacaaagagcagaggttatcatgttcttagctttaaaatcatactgaacaattcttattatcaaccaccttgatgggcaccctaggacccttttctattgcattccatgctcttggatcattggattgaataaagatcttcatcctatttttccaaaaactgaaatgctccccttcaaacaaaggaggtctgtttaaggatgcaccttccttgaaggtgaagtattcatttttgaaaaaaaaatgatcttgagtaacatacaagacctagctcttgatgccaattgtaaaatataggaacacttcacacttaaccaagaggggggtgaattggttaggcttggtaattaaaaaattttcttgatcaaaatcagagttttgcccttttggatctttatcactttagaaaccaagaacccttattcaatccaaagttcaacccaaaatatgtagtacctcaagaatttggttgataacaagagctcacaaacaagaaagataaaatatagcaaatagatagaatatgaacaacacacaaagatttatactggttcacttcaaacactatgaagctacatccagttttcttccactcaacactagaatggagttccattattgtaaatttcagttcttacaagttattacaaagcttctctttatcaaccctagataaagtttagaaatctaaaacactattagattcttagagacaacccactgagaacactactcagcaattcccctagagaaactctatctctagattacaagcaagaaactcatttacaatagacaatccaaaaccaaaatcaaaacagaattacaacttcaaagattaaggaaagaagtcacctgatgatccaatgaacagtatgcatatgaatgatttcaacaggtagacgaatgattttaaccttagaacatcactttcctcaagctttgaaaaagaaaatgttgcttactaatccctcaaagacccataaatgttttgtgaaagcaagaactcaatgaatccagaaaaaccactacaagaatgtttagaaagccttagaatgctcagtgtacaaattgatcaagttagtgaaaaagttgagcatgggttctatttataataagctttctaagcatcagtaatcgattacatacgctcctgtaatcgattaattcgcatatgtaatcgattatttcaagactgtaatcgattaaactattcaatagatgttctgggtttgaacaacgaacagaataatcggttatcccgtctggtaatcgattaagacaacaagctcctatttttgaaatacactatgtaatcgattacagattttggtaatcgattaagtcttgaggcttcataaaacaatttgtactatgtaatcgattactacatttggtaatcgattaatgcagcataacatgttgatcataggcatatactgtaatcgattactatctgtcataatcgattaagacagagagatgatatttcctatttagcctatgtaatcggttactaattgtggtaatcgattaaagtatcagtttatatgaaattataggtaaaataatcgattaatccgatacgtaatcgattacattgttcttgaaatgttttccagaaggcataaagaacttatttttccaaaaaacttagatttaaacttgcctagtttaccaaatgcttgtgtatattaaaactcaatttgattaactaaatgaattatatgaatgctatgcacgtggatcatcagaaaatacttcttccttttacattaatcacaaattgatcaccaaagcttcaaagcatgttgaaagcacaaaaccaagcttgatctaatgttcattcttcaagtgattcctctcttaaatcaacagcaccgaagcaagacccaacgtttcaaatttgaagcttgatgtcatcattgagggatacgacatcgacaacgtccgttatcgtgttgctggggatgtgtagtttaggcgtggtagtgcatttgggtcggaggtggtaggtcatgggtggcatgatgatgttgtttagtggatgaaggttgcagatctgagtggcgtcaacagtgacttcctttgagtgcctcgttaattcgtagctttgcgaggcagttggtgcgcacgacatcaatcgtgtctttctgctggatcatccattgcagtcgatcggcttcgagtcaataatggcgatcttgcagtataaggcgcaaatggggaattagtgtggtgggtgtaagtggcagcagtggaagttgaattggaaaagggtttcgtgggaaaaaaaatctttgcacaaggttgtaggaagtgagaaaagaatgaaaataaggaaatgaaattgaacgatgttggcatgtacatgttgtgaaatgttatggatgatgggtttcatagtcacacattgcacacgatttctgtattgtcggattgtaatctgaattggtaataggtttttgaaattgggtttgagtattagggatttttgggaatgagttgggtattttttataatttaaaattattaaagtggtagcttaaacctatcattatgtttaaattaattttttagtgagtgttgaaaacaatgatgtacacacacaattaaccaagagggggcagggtgaattggtttataatagagatttaaaaaatttctttgaaacaacaaactagcagcgaaattaaaaagtggatcgtattacttaatcaccctctactaaaatcagaaattttctttcaatcaatatacaccttagactgcatgtaatgtcataaacacttcttgttgattatgatttaatcacccaaaagtacaagtaatgaaagataaccagattagaaacaagagacaatgtaacgacctaaatttctacttattcttattaattttactattacttaaagataaattttctaagaagcgcatattagtaaaaattctaaaacataaaacttacaaaagttttgaaactaatacattatacatagccatagttcttgttacaaaagtccatataatacaagtacagtactttccatacttcagtctagtacataacttcctcactactccagagcttcaatgaacctgaccatggttgtcatctaagaaaaacatgaaacaaaactttgtgagaaataaaatttctcagtaggcaaagctaaatcccaaacttattagtaggttagtcaatcatcaatattcaaacacatccacaagaaatatgcaactatatgaatgaatgagatgaactatcccagggtgcaatggcctccacatatcgtactatatgtggctacacctcctactggatgtagacactgctatagtcttacgcaaacatgcatgaatattgccatgtatcctgcatctgggtactacatatcgtactgtatgtagcatcagattctgtttccccaaagcctcgtactggacttggaaacatgaatccacctatcttatcacatcaatatccatccataataaaatcaaatccaaaagtgaaatacatattaccttatggaaaaatattttcatcatatcatcatatgtaccataagtatggttacaccaccataccttaatcaagtaagattattaccaacttatgcataatcagagaatagccttaactacagaaaaatcatgttagtaatctaactaataatcctcaatataaataatatctaattcctttaaacattcacaagaaaaagattcaaacctagtatatattttaattctcctttcacctaccacctcactaattaatcctcaaaattgaatcattcaagtatttaaaccatttaactacataccattcatcctatacttttaaaatttaaatcaaaatatttccataaaaatatcaacagacagcccaaaatatcatcaaaatcaccttcaaaagatcatcaaatgggcttccatacatcactaatattgatgggtataaatcatcacctatcttatggcttaaatcaacatattctcatcaaagaataaccttcaaatagcacgaaaattcttgacaagaactcttcctaaggttgctaggtttctcacgaaaattctttcaaagtgatgggtttgtttttcttacttgattcaagctttaaaagagaaagatgaaatgaaatgaatatggtgtagggagagagtggtcacgtgaatgatggtaggagaatgccttgagaatgtcttgcacttaaagtcctttatatagtgtttagaaaatataactttccttaaaaaaatcttccaagataattatgtgccatacaagtgtcctaacacttgtcttggtcataatgatttcctttccaagtgtccacttagttggcatgcctttacaagtgtcccaacatgtgtccaatttcatgaagcttctccttgcttcatcaaagttcacgtgaaggctaggtggaggtggagaaatcttggcttcattttcatattatcttgcatccatgccatacaagtgttatgccacttgtttctatcatgtgacttgctttccaagtggcttatcatgaagtttcttgcctcttctacatgttttctcacgtgaatgaccaatctaaagggaagaaatacaattttttcttcctttcatgctacatgtggtcatttttgatgatgaataaaaatctagtttctaatatggcatttacacatggtattttcttaaaaagaaatcaaatttaatttgaattcttttatctaaagatgaataatagaactctaaatgttcctaagaatttatctcaatgatagtttaaataaatcacaagtagtctatacagagcaatatataaactttacatactaaattgctctttatcttgtttttgattggcctatagttctgctgaccatcaaaattactaaatcattttattaaattggtttatacattctataattaagagaaaattccttagattatatgtatcattcttccatatttttcttatgcttgaattttctaaaataaagtctcaaagttgttatcttataaaattcctagaaattttattctagagttttctgtcacaaaatattttgatacttagtcagctaagtgtactctataatttcataattttcctacaaaatttctaaagttatttgagcattgttggcctaggggcatattggtaattttgtcattcatcctaggggcattttggtcattttccaaaatatgcaagggcatttttgtaattttatcttaagggtattctagtaatttctacttcatggaaagagtgatttagtcatttttctttaaacatacttgtatctaaatatcatcatatttctacaagtaattataatataattttgaggatgttacagacaacaatttatactggttcacttctcaaaagagaagttgcatccagtttcttccaaccaaaccttggttagagtttcactaagtcaaatcttattctttacaagcttttgcaactgatctcctttatcaactctagataaagaaacgaaatcaaaaccctatagacttctaaagaccaagaactagagtacaccacttagttctatcctccaaagaacacaactccaaaaaaaactttaaagaacctttttgatcttagaaaatacaagaactaagaacagacaaaatagatcacagttaggagatcaagaaagatatcaccttatgatcctcagtttatgaatgagatgtattttaccaattaaacaaagtttgaatgaatgctttgcagaacacaactttcttgaaacctcttgctcagtctttgtttaaaacagcatgatctttgatgtatgaaaatagttttgaatcaagatgtagagaaaaacttttctcagactttttgagcttttgtagtgaatgagtactttgtaaaattaagatgtatattttctcacgttctaagacatatatctcaaatcacagactcaatagctctttatagaaaacagatgtaacagcatataatcgattaatacgtaagtgtaatccattattttatgtaacgtaatctattaatatgcaagtaatcgattaaaatgttctcgagacaatctggaaaacttttatgaacaatgtaatcgattaaaccgtgatgtaatcgattaaagtagtcagtctcagatatgaaataagcctttgtaatcaattatagatgaatggtaattgattaagacagtcatgcttaatttccaaataagcctaggtaatcaattacggttgagtggtaatcgattaaggcagttaggcatgttttttgcattttgtgctatgtaatcgattacgattttcttgtaatcgattaaaatgttcttctttgctttttaacaaattacacaagctggtaatcgattacttattgcttgtaatcgattaaagcaatgcacgttttgatttttcaaaacttaagtcatgagaaatttctttccaaatgcaaacatgtaaccttatgttcttttcttaaatcatgtatgcatggaagtgtttatgctttatgcaatgcaaggatcacaagataagcctcttgaaccacttaacaaatacaaatgtcttcaattgaatggcatgtaaaaagctaaaatcgttaagcaaagggcttcatccttgatcttcttttctagctccccttatatccaacaatctccccctttttggctttgttcatgccaaatattaattgaacattttttatccttttatgtgcatgagaaagatgaatgataggagctccaaacttaacctggaattaactcaaccttttgccaattctaagtgttaaattgcctttcataaacatagataatttcttagattgctccctctattttaggtaatatttcacaaacttcagaaaattagattcaaagcaataagactctttttttttccagtcaaataacacatagcatagcacctagtcatcactcttcaatcattatcaatcatttgttcaatttattttctccccctagttggcttatcaaagacaaaaaaaagaaaaataatgtaagatcaacataagcaaagaaggaagaaacgtaactttatattgaaagataacagagatacacttcctggatttaaaaacagaattgaaaatcagaacatgaagcaaaatatgaaaaagacttgtaaatagaaagcaaacacaaacagcctaagctagaacgcatcaaactcatcatgaactatcctagcctcaatattctgcaacctagactttatttcttctataacaccataagtaatgattaagaaagtgtgtaatcgattaattcataatcaaacagaggttctacaacatggtgtaatcgattaaatcgaagtgtaatcgattactccagtgagaactcaaactagagcaacatactgtaattgattaccatagtgtgtaatcaattactttagtgaggttttgattcaaaataagctttgtatgacatgtaatcgatgaattcgatgatgtaatcgattactccagagttttaaaaattttgaattcaatttaaacaaccagtaatagattatttcaatgaggtaatcaattacataaacatcaaattgttttaaagaagcattcaatcatcaaataatcgattttttcgacaagtaatcgattattacagtcaattatgcagaatatacaaatgattatgcagcaggaaactcaatctaatggatcttgatatatggacagtcatttggtgaattaatcatttagaaagacaacataataacatgctaacatatattggattcatcaagtttgcctagcatatttctaagtgcataaaacctatctcttgtcaacgactttgtaaagatatcaactaattgattaagagtatatacaaactcaattatatagttacccttttgaatatgatccctcaggaagtgatgccttatctcaatatgtttggtccttgaatgcatgattggattcttagatatgttgatggcacttgtgttgtcacagagtaagggtatttcctttaactctacaccaaaatcttgtagttgttgcttcaaccaaaggctttgtgcacaacagcttttagcagaaatgtacttagcttcagcagttgataaagcaacacaagattgcttcttgcagtgccaagagataagtgagtttcctaataggtggtaagttccactagcgctcttcctatgcaatttgcaccttgtaaagtcagagtcagaatatccaattaagttgagagatgcacctttaggataccaaagtccaacttttggtgttgacttgagatatttgagaatccttttgactgcaataagatgtgactctttggaattttcttgatatctagcacacaagcatacacttaacattatgtcacgtctacttgcagtcaagtgtaacaaatatccaatcattcctttgtattttgactcatcaacactctttcctttctcatctgagtcaagataggttgatatagccattggagttgcaacatctttgctcttttccatttcaaacttcttgatcattttcaggcagtatttggtttgactaagaaatgtcctattcttcaattgcttgacttgaagaccaaggaagaattagctctcccatcattgacatttcaaattcatcctgcattgagacataaaattctctgcacataaattgattagttgaaccaaatataatgtcatcaacatagatttgaaccaacaagatatcattgccattcttcttgatgaacaaggttttgtccacttgtcctcttatgaaagattggtcaagaaaaaatttgctcaatctctcataccaagaccttggagcttgtttcaaaccataaagagcttttctcaatttataaacatgatttggatatttgtaatcaataaagccaggtggttgatcaacatatatttcttcatcaatgtatccatttagaaaaacaattttaacatccatttgaaacagtttaaaatccattagacatgcatatgcaagcatcaacctaatggcctttaaccttgctactgaagcataggtttcatcagagtctaggccttcctcttggttgtaaccttttgcaaccaatctgactttgtccctaactatgatgccaatttcatcaagctttttttctaaatacccacttggtggcaatgggtttgtgagaagaaggtctaggaactaattgccaaacatcaattctcttaaattgattcagttcatcgtgcatggccatcatccaatgttcatcaagcaaagcttggtcaatgctctttggttcaatctgtgaaacgaaagccatagtacaacaaagatttcttaaagaggatctagtagaaactcccttggaaacttccccatttatgttgtcaagagaaaggtctttagtaattctccaattcttgagcttttggataggtgttgatggttctttttctttatttggttccgcctcttcttttttatttgatccatttatttgagtaaattcttccattggacatacatctacatcacacttattttcctctttggaggagttagattcatcacatatagcatgaactaattcctctatgcacaatgttcttttgttaaatactttataagctttactttgcaaagagtaaccaagaaagatcgcctcatcaactttagcatcaaattttccaagagagtctttaccattgtttaaaacaaaacacttgcagccaaatgctcttaagtgagaaatgtttggttttctaactttgtagagttcataaagggttttctttaaaataggtcttatgagtgatctattcaaagtgtagcaaacagtgctcatagcccaaaaatgtttaggcaaattagtctcattaagaagagttcttgctccttcagggggtcaatttttcctctccacaacaccattttgttggaggtgttcttggagctgaaaaattgtgattgattccattttcttcacaaaacttttcaaaatactcattttggaattcaccaccatgattacttcttattgagataatattgcaagctttttctttttgaaagaccttggataatttgctaaatgccatgaaaacatcactctaggatcttataaacaaagtccatgtgaattaatcatcaacaataacaagcctatagaagttaccccccaaactcatagtactagaaggaccaaataaattcatatgaagcaattcaaggggtctagaggtggaaacaacatttttactttgaaaagagatcttagtttgttttcccttttgacaagcatcacatattttgtccttctcaaacttaagcttaggcaagccattaactaaatcctttcttataagcttattcatatgatgcatgtttatgtgactagctctcctatgccatagccatgtatcattaactttactaactaggaaattagagttgcaaatgaatggatgttcaatagagggaatatagatgttaccctttattttaccaacatggataatctcacccgtttgaccatcacatatcaaacaaaaattgtcattgaaggaaactttgagtcctttgtcgcatagtttgttgtatataggggaagctggaaaagaagatcaaggataaagccctttgatcaagaggcttatcttgtgatccttgcattgcataaagcataaacacttccatgcatacatgatttaagaaaagaacaaaaggttacatgtttgtatttggaaagaaatttctcatgacttaagttttgaaaaatcagaatgtgcactgctttaatcaattacaagcaataagtaatcgattaccaacttgtgtaatctgttaaaaagctgtgaagaacactttaatcgattacaagcaaatcgcaatcaattacatggcacaaaatgcaaaaacatgcttgactgccttaatcgattaccactcaaccgtaatcgattacccaagcttatttcgaaattaagcatgactgcgttaatcgattaccactcatctataatcgattacaaagatttatttcatatctgagactgactgctttaatcgattacatcacggtttaattgattacattattcatgaaagttttccagattgtctcaagaacatttaaatcgattacatgttgttatatctattttctataaagagctatatagtctgtgatttgagatatatatcttcgaacatgagaaaatatacatcttacttttataaagtactcattcactacaaaagctcaaaaagtctgagaaaagtttttctctacatcttgattcaaaactttgtttccatacatcaaagatcatgttgttttgaacaaagactgaacaagaggtttcaagaaagctttttctgcaaagcattcattcaaactttgttttattggtaaaatacatctcattcatatactgaggatcatgaggtgatatctttcttgaactcctaactgtgatctattttgtctgttcttagttcttgtattttctaagatcaaaaaggttctttaaagttttttttttggagtagtgttctctagaggatataacttagtggtgtactctggttcttggtctttaaaagtctatagagtttagattttgtttctttatctagggttgataaaggagatcagttgtaaaagcttgtaaagaacatgatttgacttagtgaaactctaaccaaggtttggttggaagaaactggatttagcttatcttttgagagatgaaccagtataaattgttgtctcttgtttctaatctagttatctttcattacttgtacttgggtgattacatcataatcaacaagaagtgtttctaacattacatgcagtccaaggtgtatattgattgaaagaaaatttctgattttgataaagggtgattgagtgatacgatccactttttaatttcgctgctagtttgttgtttcaaagatttttttttgttacaaaccaattcacccccctcttggttaattgtgtgtgtacatcattgttttcatagtttgcttatggttaggatattgtgcttcaaaccttccatataaagaacattctttattttggttttgaagttgtctcttatatttctttctccaatgatctttcctttattattatcaccataagtgacatatcctccatctttaacggtcaagtttgtaagcatggacatatcacctgtcatgtgtctagagaaaccactatcaaggtaccataatgctgatttttctcttagacccacctgcaaaaatcaatttaagtaacaaagatagatacccaatgtgggttgggttcataggggttagttggctttctttttctttttggcacccaaatgcattcaccattaggaacatagtatcttctagcatagcacttatgggatgtatgacctttcttcatgtaataatttttgcacacttagcatttcatttaaatttcattttcctctataaagacttttcaaaagatcaaccaaataagaattttcagcaagcaataacatatacttttcaccttgactctttttgaaataatcaaattctttttgtaagatcttgcattaatcaacactataagaagatgaggcacatacacatccattggctttataacttgaaacaagttttttatttgcttctttcaaattgcaaagttcagattacaattcaacaattttggtaacatgccatttaagattacttttcagcctattattggattgtgcaatattttgtgcttcttcatgcatctcatggaaagcatcaacaatattattatattcagaatttacctctgatttgaaaacaatatgaatacacccaaatactaagaggggggtgaattggtataaacttatccttttaataactctccctaaatcagagttgaaagatctttataactttttaaaatcaatgaaacttcaattcaaccaaaccactcagtccaaggaatcaatgacaaaatcaaatatgttcttttacaagctattacaagtgattatccttatccaccctagataaagaatcataattttaacacctattagaaacaaatcataaagaacctgagaactctactcaattttttacccctagagaacactactctagaaagcttgaaagaaaattattttgatcttagctttacacaaatttagacaaagaacaatttactagaaaagttcaagagagacacaacctgtgatcctcagtgaatgaattgaatgaatgagtgttaccaatcacttcctatgttgcatgaatgttgatgaacagaaaatcaactctcttgaagttattttcaaggatcttgtcttaacacatcatcatcaatgaagcatgtaaacttttgatcttgtcttaacacatcatcatcaatgaagcatgtaatcaattaaaatgtttgttaggaattttataccacggcaagcgtaccgttgttatcgctgtaagtttggaatttataaaagttcgtctccacagggatttgggtttacgtcggttgatttaaaattaacagtttagtagttatgtacagatgagaaagagcgaagattcatttgttgttgttgttgcaaaaaatgtaaaataacggaaaacaaataaactattacgggaaatgaaaataaataaataaacggatacaagtcaagtaagtataggattggatttcgtcttgcttatccctttaattgattttacctatgcattttctattcttgttgatgcacacgtttaggtaaccttaactcgattcctcgcaattatggtcctatggatattttactaaatatcgatccctcgcatacttaattaaataaccaagcattaagatcatattcacgtgtttaatgcgatcaaaacgttatgttctattcctagcaacgtaacgtaacgagtaatttcattcagttcaaaccctaagattactttccagtctcacttaggaatttaagttcgtgaccctagtgatcaagtagaatcaagcattaagcatagaacgaaattaccaacaagaagtagaacgatgcataaataattaaaagagcatagggataagaagagtacgcccaatccttagagaagcttaagcgaacatgggcagaacctcctcgagagaatcaccgactaagctcgtcatcgatcctctcttcggtagaatctcctcacaaaagtcactcaacctcacttccctaagttctacactcacttaggaacaacaaaagcaagaaacaagagcaagcaagtgcttaggagagaaaaggaatgaaagaatggtcccttccctcttctggccgacccctttttatagtttttggccacctacttcacaccactcgcccaggcgcctaaaatggcctaattccactcgcctgggagagttaaggtcggcttcttggaacttgtagtggcctgggcgactgaaatgaactatggaagctggcctgggcaacttggaagcttaatggtgaagaaattgatgggccttggtgtcttttgggcttgttttgctgttgaaacttcccctcctttacttagtccaccccatgctcctagtttcacaagtttggttcttccgtaaccttcagacctagcaaaattgaaccaattaattgaacaaaatctttttgaaacataaaagcatgacttacctttacataatcatcatttgactaggtttttagggttatcttgtgattaattaaatttaaataacggataagtgccatattgtaatcctagttttattgaaatgtggcacttatcaattccccccaaccgagaatcttgcttgtcctcaagcaaaggtgaagagatcatgctttgacaagaatcaaattactgtttgatcagaacatagttttcaaaaagtagttaaccttgatactttgagaaaacaatttgatggatttttcatgaaatcaaaatgaggtttaaagtcaaatttacacttcctttcaaaaagacctcagaggaaacatttgactgatatcaaacagaggaaaacctctcaaaaagtgtttaattctcccaaaggtaagtgtttactctcacatccatcactgatatattataggtaaaatttgcagttcatttcctatcaaatcataatacatattcatcatggatcattaggtcttttatggctgggctttggctagaaagaaatcttggtttttctagatattcaaaagaccttaggactaggagagcaagctagaaatatagacaattttagatctttcacttttacttcctattcctttttttcttttttccaagacatcttatttttatcattttcacccaacttttcttttccaagggattttatttccttttcttttattttttcacatgctaacatataaccactacaaacattcttttcataacataactatccacaagaattttctatcacaaatattccccttttgctctcctaaccttaggtacggtatgaagttcctatcctaggttagggtttcaagaaaatattactgtttaggctcaaaggggttttcaaaggataaatcatttgatatatttgggataactttttggctagtggcttataatgtattcaaaaagaaagatggcctaaatcatatccatgaatcatatgcttatgacaattagaaattcatgcaaaaattactatagattataccagtgagatctctttgtgtataatgtctgtttagatgcacacactcacttgggctcaaggtctgttttcatgttttcaaccaaatcatttgttttcctctgaagttatttatcaatttccatgtaaaaagatttttttaccttgattttgatttttctgaaaaagaccatttattcttgtttttcatttctcaagggttcctacaaaaacttcatttttgtggttttgatctaaaaagaagtttcaaaacattttcagttgattcttttcaaaacataatatatcagttaagtcccaaaaagatttcacacaaacataaaaaagtattttaacatatgtaatctagaaaagagaaacttctatgtgcaagcaaaaagaagcaaacatagtaactaaataaacaaagtactgaaattaaaactacaaagcagtaaagaaatctaaaaacgatatcactgtttttggaagatcgtggctgagaagcttgatgccctccattcaggtaatcagcaaaatctgccacgttcttttccttgcttttgccttcttcttaacaaaatggacctataaccaagttctaacaaaacagatgatattttcaaaaagataagatataaagacaataaataaaggcagaatttaaaaacatcgggttgcctcccaggagcgcttctttaacgtccttttagctggacgagtttgctatggctttggctccaaataattggaaaatgtggacgggccattaactgttgtgtcttccttattcaagacatccatcttaaaacattatttttcatctttagggtgttggatgtcttcaaaaacattgaactgaatttcatcattttgtactctgacagtgagctttccttcatcaacatcaatcagcaccttggcagtcttcataaagggtctgccaagaatcaacagtacttcactgtcttcatccatgtccattactacaaagtcgactttggaagaagaacttgtcaacttttaccaacacatcttcaatgacgccatagggatgcttaatagatgtatcagctaactgcagcgtcatcctagtaggcttgactataagcccttctatcctcttaaccatagataatggtatgaggttgatgcttgcacctaagtcaagaagagattttcccacagataatttaccaattgtaacaagaattgtaaagctacctggatctcgagatttttctgggagagtcttttggatgatggcactacatcctgcatctagctctatggtctcctcgtcggtgtatcttctcttcttagttaggagatccttcatgaacttggcgtatgttggcatctgctccaacgcctcagcaaaaggaatgtttatttgtaactgcttgaagatgtcaaggaaacgtttgtattccctttcctttgacttcttggatggagcatgtggatatggcatatgttggactggtggtggggttaaggctgctttgcccttgtcactctttttctttttctcctcttttacaacttttttctctattctttcgttggtttcttcctcatccttttctttttcttcttctcctttccttccaaccacagttcccctttcttgtgataatggtgttacattgctccttggggttgacttgagtatttgttgaaaaagatccacctccatgctcagccactgcttttgcaagttgtcctatttgcacttctaaattcttgatagaagcttcattattctttcgattgctgatggatacttgcatgaactgagtaagagtatcttccagttttgtcaatctgtcagattgatcttgttgtggcatatttctatttggaaaagtattagaagaacttgcaaaaggagggttagtggggacattataagcattataagcattatgaaaaggttgattagaacctggaccactgcgataaccttggtaattcccttgatagctttgttgaggtcttgattgattttgcatgtagtgaactttctcttcttgtggaaaataactaggtattgaacaatggccattctaatggttgcctccacagaagtcacaactcaatttttgttgaacgtgatgtgctttttgtgatcctccttgctgaagttgaggaagttggcctatttgctttgttaaggcttctaattgctgggtcaagagcttgttttgagctaagatagcactttgagtgtcaagctctagtatgcctttcctctgaatgggtgacctatcatggtgagactgatagtcacttgcagctattgagtcgatgatcactattgcttcctcgggactctttgacatcatggttcccccagctgaagcatctaagatcatcttagtttgaggcctcagaccactgtagaagatatgcaactgagcagcgtcatcaaaattgtggttcgggcatctcctcaatagtgatttaaatctttcccaagtctcacagagaggctcatctactccttgagcgaaagtggcaatcgcagactttgcactgatgaatcttgaaggtggaaagaatctaacgatgaatttctcctccaagtcttcccacgtgcttagactcttgttgggttgtgattgaagccaagtctttgctttacctgttaaagagaaaggaaaagctctaaggtagacagcttctgcatcctcgtccggtgctcccatcgtgctacacagctccatgaaagtagatagatgtgtataagggtcttcctggtctaattcggcgaaaggatgcgagccaatgaggctaagtagtgcaggcttcaattctacaactttgtgtgaaacggagggaaaactatgctattataatgcttgggcccttgttggtaggcatagtccccaagtgtcctccttggtggttgtctatcttcttctcccccttgattagccatattattttttatctgtggtgaggaaagatcaatagacgaagctccctcaatatgcttgtcagtctcttgtttctttttctttcggagtttcctttcgattttggagattttcggatcaaaatgagttttatcttcagacttatctcgcataaagaaaaaagaaaagaaactacaagatttttgttaagcacagaggtttaaaataacaaagaaatatatacacaaacagaaaataaagaacaagaaaatactaaactgaaatttaaaaacaacttaagtaaacaagccaaatctccggcaacgacgccagaaacttgttaggaattttataccacggtaagcgtaccgttgttatcgctgtaagtttcgaatttataaaagttcgtctccacaaggatttgggtttacgttggttgatttaaaattaacagtttagtagttatgtacagatgagaaagagcgaagattcatttgttgttgttgttgcgaaaaatgtaaaataacggaaaacaaataaactatcacgggaaatgaaaataaataaataaacggatacaagtcaagtaagtataggattggatttcgtcttgcttatccctttaattgattttacctatacattttctattcttgttgacgcacacgtttaggtaaccttaactcgattcctcgcaattacagtcctatgaatattttactaaatatcgatccctcgcatacttaattaaatacccaagcattaagatcatattcacgtgtttaatgcgatcaaaacgttatgctctattcctagcaacgtaatgtaacgagtaatttcattcagttcaaaccctaagattactttccagtctcacttaggaatttaagttcgtgaccctagtgatcaagtagaatcaagcattaagcatagaacgaaattaccaacaaaaagtagaacgatgcataaataattaaaagagcatagggataagaagagtacgttcaatccttagagaagcttaagcgaacatgggcagaacctcctcgagagaatcaccgactaagctcgttatcgatcctctcttcggcagaatctccttacaaaagtcactcaacctcacttccctaagttctacactcacttaggaacaacaaaagcaagaaacaagagcaagcaagtgcttgggagagaaaaggaatgaaagaatggtcccttccctcttctggccgacccctttttatagtttttggccacctgcttcacaccactcgcccaggcgcctaaaatggcctaattccactcgcctgggcgagttaaggtcggcttcttggaacttgtagtggcctgggcgactgaaatgaactatggaaactggcctgggcaacttggaagcttaatggtgaagaaattgatgggccttggtgtcttttgggcttgttttgctgttgaaacttcccctcctttgcttagtccaccccatgctcctagtttcgcaagcttggttcttccgtaaccttcatacccaaaattgaaccaattaattggacaaaatcttttcgaaacataaaagcatgacttacctttacataatcatcatttgactaggtttttagggttatcttgtgattaattcaattaaaataacagataagtgccatattgtaatcctagttttactgaaatgtggcacttatcaatgttcttcatggattttccagaaataatacatgcaggtaatcaattacttattgcctgtaatcgattaaggtagtgcacattttttatttttcaaaaaccaaagccatgagaattccttttcaaatgcaaacatgtaatctcgaatgcttttcttcagtcatgaatgcatgtatatgaatatgcttatgcagtgcaaggatcacaagttaagcttcttaaactacttagacaaaattacaaatgccttcaatttgattggcatgtaagaagctaaaactctaaagcaacatcttcatccttgccttgttcttcttccatctccccctatatccaacaatctccccgtttttggctttgatcatgacaaataccaattgaacatttgtaacctttaaatgcatgagagagatgaatgataagagctgcaaacttaacctaaaattcactcagactcagccttttgccaatatcaagtgttaagttgccttgcataagcatagataaattcttaggttgctccccctattttgggtaatatttctcagtaatacagagcaattcaaatagcacatgtttatacagaagtgctcaatttatcaattaattttctccatcattagttcaatttattttctccccctagttggcttatcaaaggcaaaagcattgtaagatcaacataagcaaagaaggaagaaacagaaactgaacttttcattaaaggaaattgaaaaaaaaatagaacatgaaacattaaaaacagaacataacataaaaaatagagcatgaaaaaccagaacacaatcacaagcacaaacaggattagcttgaactagggctcatcaaacccatgtagaacaatcctagcctcaatattttcaaccctggacctaatctcttctaaggatgagttggtctcagctctatgttcatgatgtaatgtcagaagagcatccatcttttgaatcattaaggattcaaatggaaagtactcttgttgagtaggttcttcttcagccacttcttcttcatcagctcctcattcagcacctgcagcttgaggttgttgtccaaccattttacgtccataaagagtcttgatgagtccaaacttgttgagatgcttgtccttaatgaggttggtgatgtctgttgtgttgtcaaccacctcatttgagacatcaatatggaaatagtcaatgaatctagagataagcacaacatagggaaagtgatagttgataagccttgaagctttcatcatgatttcaacaaacacaagaacccaattgatctgagttgagttcttcatgcgatataccaattgcaaatcatcatctgtgattcggacatggtttgtggaccttggggtaagaatgtgggttataatatagtgtaataacctatcttccccagtcatattccccacaccaagtcttgttttcaaccgtgcttggggatcaaacaacatacctctatatgtttcaatcttgttatagcccctaatttcttcatcaaacctcctcacaccaacagaggagattccagccacaataaaccaaactttttcatcaatcaccatgggcacaccattcacttgagagcgaatagttccatccatgctggctttagcacaagtataaaataccctcactaattcaaggtagaatgtacccttaagttcaaggaacttcttcaatccttggacttcaaacatggcagggattgaaatccctcattgatgaaccagttgaggtccaaatacttaggagccatgaccagcttggtggcattgaattgcatatagtttattctatctttttccactggaaaccaatgattcagcttatttccaactggattggaggattccccagcctccttttgctggttttggctttctttgaggtagacattgtaaaaactcatctcgtcgctacgatatcacaaactcttagtcgtgcaaatctcaattctaaataaaactccattaatttgattatgaaaatgatggtaaatttttcgcaataatacaattatcatacacgtattacatttacataattaaacacatatgtacatatatattaaatcggtacatgtcatccacatgttagaacttcctttagttttacatgtatatacacctaaaattacatatctaacaaaaagtcaaagaactaactaagaaagagttgattaacaaaatataactttttctccaaaaagaaatccaacatcatcacgtctgcttggcggctccaaccaaaagaagatcttcctccaaggtcacctactgctgctcatctgctcacacgaacgaaagttcgcgatcatcacaggtaccaaccacatggtacaaaaaatgcaagggtgagtttattatataaaaccaacaagcatcaggtaacaacaattggaaaggaaacaacattacccaccacaataactaataaaaatccattattccaatacacactcaacaaacccatcatccaatacatttcacaactcaaacaatcatgcataacatgatgcatgcacctgactcatctattagcatgcaatgtggcaccatccacatgaaatagcctctctcaggaaaatgatgcagtagcttgtcgaggtcacaagggagttccaaacagagtgatgccaccctagtacccccgtacctactgccaccatcatatttccatcaatgcaaatgaagtatgaaacatgggcatcatcaacgtatgacccaactaggaacacatccttcctcgcaagggtaacccgtcatactcctccatgtacatacataacaccccaatatgggctcacccatgcactgaccatggctaggaacacatccttcctcttaagggtaaccaaccggtcactgcatcccacatgtacatacacatcatacaaccatgggaaccatcaatgtatgacctggctaggaacacatccttcctcgcaagggtaaccagtcatacacccccatgggtatccatgtatatccacatcacacaatcacaaccataggcaccatcaatgcataacccggctaggaacacatccttccttgcaagggtaaccaatcatgcacctcccatgggtgtcaatatatatccatatcacataataacattattagcatcatcataatctcttaccaatgtcattattaatatccacatcacatcatctaactccatcatcatacatatcaaactcatctcatttcaacatcatcaactacatcaacattatttcatttgtacatcatcaaacacatcatcattatctcattcaatattcaccaacatatcaataacatctcatttcaacattatcaatgacatcaatatcacgtcattcatccacaatccatattaccacgagattggtattttaggaaaattctaaattaaagaggaggactaaaatatagaaaacacattcttatgcccatttaaaaatttaataaagaatcaaataggaaaacatattataaaattttgggcagagtctcctctgtaattaagacttttcctaaaatttcaatcaattacaacaacaacatcattcacagttttatccatcaataacaaattcatcgcatcccattagttaaaaacacagtttttcctgaaaacgagcacacacgggaacaaacacacatcaatcataaatacatcgcatcccattagttaaaaacttagtttttcttgaaaatcagcgcacagcagggacaagcagttatcttcatagttggactccctggccccaactatggtatcaaaactataactaattaataaactcctcttatctatctatatctctctgttagctccttgaaacgttgttttaggatctctcaagttcatgtgctttggcccaaatgcagagttctatataccaaattgaagataatttcatatagatttcaaaaacaagactaatgttagcattcagagtcaaatacccactcaaatttaaaaagggttaaatagtgttttgggagttcaacaaggattacagaaatgacatcaatttcataaaaatgagacttttacaacatctcattttcaaaggatttttcaaaggaagtgtaaaactcccaacaacagtacccaaaacacaagaaacactaatagaagcttaaactagctaggagaagaccaaagaaactaagattccctcaaggaaacgaagaaagaaggatttggaagctccgttctctatcgaaacttcgagaacagtttcaaagattccgctccgattaggtggttcttctctgtgccggggtctcgtggcaagcaacgacggcctgtggtggttgatggtggtcgtgggtggtgggggagggtggtggagggcttgggtgttggttgagggagaaagaagaccaatttttcgtggtctggacactgaaatacatatttaacactgccttgactcgcccaggcaagcaaaagtgcctgcaaaagtcgcctgggtgagctgaccaaattttaaaatttctacttctatgaaaaaattaatttctcatgctccagacattattgtgacaatcccaacggtcaaaagttacatatttgggttagaaacctacctttaaaatatgaaggcgatccaaccgttaaccaatccagaatggtaattttactaaaaataggtttcaggtcaaactcgaaatcacacaattacaacgcaactccaacaactccacataacttgacatctacaccaagcaattgcgcatggataattcacataacatttaaattaatcttaactaatcaaataatcaaacaatcacaacaaatacatcaaatatctattttcagttatcaaaatttcagggtgttacagacttgacaatttagaatggaaagagagaatgggtagagtttaggcttgagagagagagagagaagagaactaagaaattaagagatttaggtgtaattttctctctagtgaaaagctgtatttatagtggtttttgggtttcaaatttgaaatttaaaagacactaacaactatttcgaatgcctagaagtttaaatgctcaacaatatatttgaaatttgaatttaagtgaagatttggcagtttagatttccaagaaatttgcagaagttgcagtaacgccatgtgtaatagattacgagagtcagtaatcgattaatttgtgtccaaacagagactctgctacatggtgtaatcgattaaaatgaagtgtaatcgattactccagtggggcacaaatcaaaacaacacacagtaatcgattaccatcttgggtaatcgattactccagtctagatttgctattcagaaaacttttcaaccaaaagtaatcgattaatctgaggcgtaatcgattcctccataacgagaactttttttggatagagctaaaacagagtgtaatcgattaattcgaagatgtaatcgattacatctttgaaaatttgttttaaaaacagctttcaatcatcaaataatcgattatctcgtgttgtaatcaattacacatgtctattatgcagaataaacaatgattatgcagcaggaaattcatttttatgcattttttatgtattgtcatttatctagtgaatcatcaaatagaagggcaattaaaatgacatgctaacatatgttagattcatcaagtatgcctagaatgtttctaagtgcataaaacctatctcttgccaaaggttttgtaaaaatgttagccaattgatttaaagtatctacgaactcaattttacaattacccttttggatatgatccctgaggaaatgataccttatctcaatatgtttggtccttgaatgcatgattagattcttggatatgttgatggcacttgtattgtcacagagcatgggtatttcctttaactcaacaccaaaatcttgtagttgttgtttcagccaaaggctttgtgcacaacagcttccagcagagatatactcagcttcagcagttgataaagcaacataagattgcttcttgcagtgcgaaagattggtgagccgcctaataagtgacaagttctacttgtactctttctatccaatttgctccttgcaaagtcagaatcaaaatatccaattaagttgagagatgcacctttaggataccaaagtccaactcttggtgtagacttgagatacttgaggatccttttgacaacagtaaggtgtaattctttggaatttgcttgatatctagcacacaaacacacacttaacataatgtcagatctacttgcagtcaagtataagaaagatccaatcattcctctgtattttgactcatcaacactttttcctttatcatctgaatcgagataggttgatgtatccattggagttacaacatccttactcttctctatttcaaacttcttgatcatttccaggaaatacttggtttgactaagaaatgtctcattcttcatttgcttgacttgtagtcctagaaagaatgtgagctctcccatcattgacatttcaaattcactttgcattgagacagaaaattctttgcacatagattgattagttgaaccaaaaataatgtcatcaacatagatttgaaccaacaagatattattgcctattttcttgatgaacaagattttgttcacttgtcctcttatgaaagattggtcaagcagaaatttgctcaatctctcataccaagaccttggaggttgtttcaaaccattcaaagcttttctcaatgtgaaaacatggttaggatgtttgtgattaataaatctaggaggctaatcaacatatatctcctcataaatgtaaccatttaaaaatgcacttttaacatccatttgacacaatttaaaattcatcatacatgcatatacaagcaacaacttaatggcctctaaccttgctactggagcataggtttcatcatagtctatgctttcctcttgttgtaatctttggcaaccaatctagctttattcctaactgtgatgccactttcatcaagtttgtttctaaaaacccacttggtgccaataggtttatgagaagagggtctaggaactaactcccaaacttcatttttattaaattgattcaattcatcatgcatggccatcatccaatgttcatcaagcaaagcttggtcaatgctctttggttcaatttgcgaaacaaaagccatggtacaacaaagacttcttaaagaggatctagtagaaactcccttggaaacttccccaataatattgtcaagggaaaggtctttagttgttttccaatccttgggcttttgcaatggtgttgattgttccacttcatcatatggttcttccttttcctttttacttagatcattgagttgcaaatattcttccagtggtcttacatcaacatcacactctttttcctccttagaggagttagactcatcacatataacatggacatattcctctacacataatgttcttttattaaagactctataagccttactttgcaaagaataaccaagaaaaatagcttcatcagctttagcatcaaatttcccaatagaatctttaccattatttaacacaaaacacttgcagccaaatgctcttaagtgagatatatttggcgttctacctttgtatagttcataaggagttttctttaaaagaggccttatgagtaacctattcaaagtgtagcaaactgtactcaccacatcagcccaaaagtgtttaggcaaatttgtctcattaagaagggttcttgctccttctttaagggatttgtttttcctttccacaacaccattttgttgaggtgttcttagagctgaaaaattgtggttgattccatattcttcacaaaactttttaaattactcattttggaatttaccacaatgatcacttcttattaaaacaatgttgcatgccttttcattttgaataatcttggctagttttctaaatgttgtgaatgcatcactcttggatcttataaacaaagtccatgtatatctagagtaatcatcaacaataacaagcccatagaagttaccccctaaactcatggttctagaatgaccaaataaatccatataaagcaattcaaggggtctagatgtggaaacagcatttttactttgaaaatacatcttagattgttttccctattgacaagcatcacatattttgtccttctcaaacttgagcttaggtaaagcaatgactaggtcctttcctataagcttgttcatatgatgcatttttatgtgattacctctcctatgccatagccatgtgtcatttattttacttacaaaatgcatgctcaatggagagaacatatatgttacctctctcttaccaacttggatgacctcgccattttgaccatcacatattaagcaacaattgtcattgaatgagactttgagacctttgtcgcatagttggcttatgcttaggaggttgtgcttcaaaccttccacataaagcacattctttatctttgctttgaagctatgtcctatatttccttctccaatgatctttcctttattattatcaccataagtaacatatcctccatctttgagaatcaaatttgtgagcatggacatgtcacctgtcatgtgcctagagcaaccactatcaagataccatagtgttgattttgctcttagacacacctgcaaaaatcaaattaagtaacaaagaaaggtacccattttgggttgggtccataggggttagttggcttcctttttctcttaggtacccaaatgcattcaccattaggcacataatatttccttgcatagcacttaatggatgtatgacctttcttcatgcaataattgcaagtaatagtgtgtgatgatctttcaaaatgagtcaattgatgatgctttgttttttaaaggcctttttgatacttttgttttggaagcacaaaccttgtttttccaaaaggttttgatccatgtttgtaccctaaacagaagtatctctagcatatttttgtccacttagcatttgatttaaattgcatttacctctataaagccttttcaaaagatcaaccaaataagaattttttgaaagcaaaaatatatatttttcaccttgactctttttgtaatcatcaaattcttcttgtaacatcttgcatttatcaacatttaaagatgatgaggcacaaacatatctattagctttgtaacttgaaacaagcttttcatttgcttctttcaaattgcaaagttcaaattgcaattcagcaattttggtaacatgccatttgatattacctttcaacctattattggtttgttcaagtttttgggcctcttcatgcatctcatggaaagcatcaacaatattatcatattcagaatttacctctgattcaacagttgataattcttcatcatcacttattgtagaggtgaagcacaaatttgcttcttcattctcgtctgttgatttagtaattgaatcattttcttcccacactatgtatgccttctttggcttcccttctgtataatataggaacacttcactcttaaccaagagggggggtgaattggttaggcttggtaaattaaaattttcttaaataaaatcagagtttttcccttaggatctttatcacttttgaaaccaaaaatccttattcaatcaaatgttcaatccaaggtaaccaatagctcaaaattgaattgataaacaaagcaagtcaatcaagatgaacagaatataatcaagaaagaaattaaaaatcaaagaacacaagatttatactggttcacttcaaacactatgaagctacatctagttttcttccactcaacactagaatggagttccactattgcaattttctgttcttacaagtgtttacaaagtctctctttatcaaccctagataatgaaaatgataggaatacttcaatacaaccaagaggggggtgaattggttgaatccttggtaaattaaaattttcaaatcagagttttcacaggatctttatcactttaaaaattgttttgaaaccaagaatcttatattcaatcaaattcctctgtcaagaaatcaataagcaaatgatagttttctgtgtaatgaataaaatttgattcacaaacaaagcaattgagagatgaagagataggaataaagatcagccacagattttatactggttcacttcaaacactatgaagctacatccagttcttccactcaacactagagtagagttccactattgcaaataatattcttacaagatattacaagcctctctttatcaaccctagataaagttcagaagtctaaaacgctattagacccttagagaccaaacccaaaattgagaacactactcagcaacccttagagaaacactatatctaatcttcatgtaagaaacccatttacaataagctaatctttacagaaatcaattaaaagatttacaccttcaaagaataacgaaagatttcacctgataatccaaaaaacacatgcatgtgaatgattcaacaggttgaaagaaagattacagactcaatgcatccctttctttaaactttgaaacttaatgatgcttcacttcttcaaatcaaaaacccatacgaatttgtgaagcctaaatgctttttgaaactcagaaacacactaaagaaagctcatgaatatttgcgattgcccagaatacgaaatattcaatctcataaagcacagggcaatgggttctatttataacaactttctaactgaaaataatcgattaaacacgctcatgtaatcgattattccaagaatgtaatcgattaaagtgctcctgatatgttctgggtttgagcaatgaacaatataatcgattattccgtcaagtaattgattaagacagacactcatgtttttcaaatacactgggtaatcgattacgaaatttggtaatcgattaagacagacaatccaatattctcaaatgtactatgtaatcaattaaaacgatatgtaatcgattaaatcagcagaacatgttaaccataggcattatatgtaatcgattacgaacttatgtaatcgattaagacagtcagtatgatttttccattttagcctatgtaatcgattaattcgatatgtaatcgattacgatgttcttgatttgttttccagaaggcacgaagaacaaaataatctatgccaacaatgatgtaatcgattaatgcaggaaaacttcatttttccaaaaacttttattttaaaatgccttacttgttaattgcttctatttagaccttcaatctaacaatcctagatgaatgattatggatgatatgctaattggattatcagataacacatcttcccttttacatgaatcaaattgatcttcatagcttctttggcacatttgcaatgaggcatgttgaaagcacaaaacaccaatgcttgatccttgttcattcatgcatgactcctcttgaatcagcagataaagttcagaaatctaaaatactcttagattcttagagacaaccccactgagaaaactactcagtttaacccctagagaaattctatctctagattacaagcaagaaactcaattacaatagacaatcaaatacaaattcacaaaagagttacaaccccaaagtttaaggaaagaaatcacctgatgatccaatgaatgttatgcatatgaatgagtaatcaggttgaaagatgatagaacatatccttccttaaccttttgaaagacacttcttgcttcaagaatcacttaacaacccataagtgttttagtgaaagcaagaactcaatgaacccagaaaatcactaagaatatgttttgaaagcttgggtatactcagaatacgtattgatcatgttacaaaaacagctgaacaagggttctatttataacaaaccttctaaccatcagtaatcgattaaatacgctcctgtaatctattattttgctcatgtaatcgattaaaacagacagtttcacaaatacaaatatactatgtaatcgattacaaactctagtaatcgattaaaccaggaagttgtataaactggtttgaactatgtaatcgattactacatttggtaatcgactaaaccagcagaacatgttaagtataggcatataatgtaattgattactaaccttggtaatcgattaagacaggaagatgatattttctgtttagcctatgtaatcaattacaacttattggtaatcgattaaactgtttatcaaggctttttataaataaactaaggtaaaataatcgattattccgatacgtaatcgattacattgttcttgaaaagttttccagaatgcactaagaacaaaataatcgattattatcataacttaatcgattaatccagtaaagaaacatatttttccaaaaaccttagatttaatttcaaaaccttaaacaatatcaaagccttgtgaattctaattcttaaactaattgatttaatgaatgattgtgaatgcaatgcaattggatcaccagaaatgcttcttccttttacatttaatcacaagttgtttttcaatccttcaaggcatgttgaaagctaaaacttgaatcaaacattgcctaaacttcaagcagctccccctgagttcaacaccttcctttctagtcttcctttcaccttgttgcttcttcaaaaagattggacattcaaatttaatgtgtccaggtttaccacattcgaagcaagtgaagttggtggagttgttgttgttgtcttttttcctgttaaactttgacaactttttgttcttgtttcttctcatgaacttgctgaatttcttcactgttaggttcatatgttcatcactttcatcttcacttgagtcttcttccttttccacatgagttgatgcagttttcaaggctatactcttgtgtttcttctctacatcctctgcatgtgttagttgtgacatttcaagttcatactcaagaagcttaccaaaaagtgcagccatgaacatcttggataaatattttgattccttgattactgtaacttttggttgccatggtcttgtaagacccttcaatattttgatgttcaattcttcagcatcaaagatcttcccaagactaagaagatggttgacaatgtgagtgaaccttatttgcagctgagaaatgttttcagtgttgctcatcttgaacatttcatatttatgaatcaaggtatgcttccttgatcttctcacttcatctgttccttcatgagttacttcaacatctcccacatttcctttgcgcttttacacctaacaattctaaagaattcgtcaaaagaaagagcaaatgtaataatgtttttagctttaaaatcatattgcacaactctttttctgcttctgtcatctcatcccactccttgggaataaattcattatcaacaatctttgtagggatcaaaggacccttctcaataaaattccaagcacctgggtcatttgactaaataaaaatttgcatacaatttttccaaaaactaaaatgctctccttcaaacatcggaggacgattgagggagacaccctctttgaaggttatctgtgtggtattcattttcttgaaaagatagtgatcttgattaactttcaagaaccagctcttgataccaattgaaaacaatatgaatacacccaaataccaagaggggggtgaattagtataaacttgaccttttaataacttttataaaatcagagttgaaagatctttatcactttttaaaatcaatgaaacttcaattcaaccaaaccactcaatccaaggaatcaataacaaaaatctgcacttgttgattaagaaagaaatcacagttatcaagagatcaagataacaagaagagatagagtgatcaacacaaaaacgtatatagattcacttctcaagagaagctacatccagttcttctaatcgtacaagattagagttccactaaatcaaatctgttcttttacaagctgttacaagtgattatccttatccaccctagataaagaatcagaattctaacaccctattagaaatcaaatcacaaagaacctgagaactctactcagttctttacccctaaagaacactactctagaaagcttgaaagaaaactattttgatcttagccttacacaaatttagacaaagaacaatttactagaaaagtttaagagagacacaacctgtgatcctcggtgaataaattgaatgaatgaatgttaccaatcacttcctaggttgcatgaatgttgatgaacagaaaatcaactctcttgaagttcttttcaaggatcttgtcttaacacatcatcatcatcaatgaagcatgtaaacttttgatctcaaacaagaaatgtatcactcagaaaatcagtttcttggacctttgaaagcttagaaagtgttgagtaattcgtaaactcagaatgtaattcgtatctcaaagcacagatccaaaagctttaaatagaaaacatatttaactgattgtaatcgattaatatgtaagtgtaatcgattattttgcatcaagtaatcgattaagatagctaataatcaattaaaatgttcttgagacaatctggaaaacttttatgaacaatgtaatcgattaaactgtgacgtaatagattaaatcagtttgtctcaattatgtaagaagcctttgtaatcaattaaagtgcagaaataatcatattcttagctttaaaatcatgctgcacaactctttttctaaattcgtcatcccatcccactccttagggattctatcattatcaacagttttcataggaaccaaaggacctttttctatagcattcatgcaccagggtcatttgactgtatgaaaatctgcattttgtttttccaaaagctaaaatgctctccttcaaacatttaaggacgattgagggagacaccctctttaaagataatctatgtggtattcattttctttaaaaaagattgtgatcttgaataacactcaagaaccagctcttgatgccaattgaaaacaatgatgtacacacacaattaatcgaaaggaggggtgaattggtttataacagagatttaaaaaaaaatcttgaaacaacaaactagcatcaaaattaaaaagtggatcgtatcactcaatcacccttttatcaaaatcaaaaattttctttcaatcaatatacaccttggactgcatgtaatgttagaaacacttcttgttgattatgatttaatcacccaagtacaagtaatgaaagataaccagattagaaacaagagatagcaatttatattggttcacctctcaaaagagaagctatgtaacaccccgtaggcctccgacgtgttatcattaataatatcatattagcgcataaaacacagtttataaaacttagcggaagcacagaattgcttttcttgatacattatgtatggaataacaaattcatcagataacacacacaaatcatatgatatgcccctgctgatccagtttctcatacatacatcatagagacagataactacaaaacttaggcaaatagtcacatgtacaacaatatatatactcagggaaagtctcatatcacaactcaagtagttctgtacatatatacatcagagttcacaccactctgtggtgaatacaaaagaataacagccctcctcgagggtatacagaactatacatcaaaacataatcagaatagagtcttcaagctctccatgccgcttctctgtcaagcagcctagtctctgctgggcctcttgccctgagactggtcttctcttctaacaaggtcacctgaaatcatagaaaacccccacacagggtgagataacatatctcagtaagctcagggtccatgggaaatcatttccaccctggcccaccgattcacaacacatacacaggcaaacatatcacacatggccctttggcctggcactctggcctcatcatatcaaatcaacaacataatctcagcacatgacaggtggcagagctcctcaatgcctggcagagctcctcaacgccctgacggagctcctcaacgtcagtacctatcatgatgtggcagagctcctcaatgccacgggcggagctcctcaacgcccagaatacacgacagagctcctcaatgccggtattcatctattggccaatagatatatctcaatcacagcatacatgtatccaacacagatgcacacaagatcaatataaataatgtcatagccaatgcatgcatcatgaatcatgaccaacactccccaggagtgtggtgtgcaaccaaaacgggaattcatcccccagaaacactgaacttacctggtaagggattactctgaagttccttcccaggtctgtggctcccgccaccaacagtctcagaatcagtgcctaatcaaggcataacaatctcatatcaaaaccagtccacatacatacaattcacaaaacatattataatagaattcccatatcctagggttcattcaagctcagcccacacacacaaggctactctcagaccacacaaggtccatcagggcgaaatacacgccatctgagtcatcctagactcactacatatatatatatatatatatcctaagctttactcagccccagaagtcaattgtcgtcagaacgggctgagttctactcatagccctactccactagcctctcggctcagaacatcacaatcaaggctctagcctatcagagaaccatcaacaactgactttacacaagtcacgcgggcatatacagagccaagattcaaagtcatcagaaataaaaactgaaagctattccttcatctattcatcgctctgaacaagtttctcaacaggaccctgggctaattctagccctagctaatatgggtcactattcataaaatcgcccagaatcaaaattaaacagaaaaacttgagtctcttacctcagtggcgactagaaacacctcaggacaactccctcgagcttttatatcctttaacaccgtggttcttcgccagactcaagttttctgagctttttcctctgaggttccacttctcacaaaaaggggtttttcaagagcagaaaatgaaggatttaggcttcaccaaggtttcactcacactcaaaggtcatcaggaagtgtttgggctagcataaagggtcccagaaagcttggaactgccattaatggaggtttgaaggtccagggaagaagaaggtgccttttccctcaaattttcgcgttttgacccttttatactcagcctgcccgagatctggtgcgatccgcgccacctctggcgcgatccgcgccacaatgtcggtggtcccgcgctaacagcgccaaccccgcgccatcagcgctaacttcccgagacctgtggcgccacccgcgccaccgctggcgccatcagcgtgaaaatccagagaaaactgattttccaaggcacttctggcgctatcagtgtgaaccttgacgtgaccaacgtcaactcctaaaacaaatggcgctacctgcgccaaccgtggcgctatccgcgtagaattccagagaaaataggttttcaaggccacttaccgcgctaaccgcgcgacctatggcgcgactcgcgctggctggaaacctctggcgcccctggcgccacattgacgcccctagcgtcagcttccagtgggtctggcgcgatcagcgccagccctggcgccatccgcgccgcaccctccacagggttttctcatgtgaatccccacgctatcgcagggggttaggtgccaagaatgagggtccttacaagctacatccagcttcttccaaccaaaccttggttagagtttcactaagtcaaatcctgttctttacaagcttttacaattgatctcctttatcaaccctagataaagaaatgaaatctaaaccctatagacttctaaagaccaagaactagagtacaccacttagttctatcctccagagaatactactcaagaaaaaactttaaagaaccttttttatcttagaaaatacaagaactaagaacagaaaaacaagatcatagttaggagttcaagaaagatatcacctcatgatcctcaatatatgaatgagatgtattttaccaatcaaacaaagttttaatgaatgctttgtagaacacaactttcttgaaacctcttgtttagtctttgttcaaaacagcatgatctttgatgtatgaaaatagttttgaatccagatgtagagaaaaacttttctcatactttttgagcttttgtagtgaatgagtactttgtaaaagtaaaatgtatcttttctcacgttctaagatatatatctcaaatcacagactcagtagttctttatagaaaacagatataacaacatgtaattgattaatatgtaagtgtaatcgattattttatgtaacgtaattgattaatatgccaagtaatcgattaaaatgttcttgagacaatctggaaaactttcatgaacaatgtaatcgattaaaccatgatgtaatcgattaaagcaatcattctcatatatgaaataagcctttgtaatcgattacagatgagtgataatcgattaagacaatcatgcttaattttgaaataagtctgggtaatcaattacgatttgcttgtaatcaattaaagtgttcttcatggctttttaacagattacacaagctggtaatcgattactcattgcttgtaatcgattaaagcagtgcacattctgatttttcaaaacttaagtcatgagaaatttctttccaaatgcagacatgtaactttatgttcttttcttaaatcatgtatgcatggaattgtttatggtttatgcaatgcaaggatcacaagataagcctcttaaaccacttaacaaattacaaatgccttcaattaaatggcatgtaaaaagctaaaatctttaagcaaagggcttcatccttgatcttcttttcaagctccccctatatccaacaagtgtaacatcttatttgaggtgttagcttataaattgttgtagcctattttagtgtatgtgtatgattaattgcttaaggtgtttatagaaaattatttgatttttttataatagtatagttattattgatattattagctagccattatttgattatttgattttttttttgcatcaaatttgccaagaaatgtctttccatcatttaaaacaaaacatttatagccaaaaactctaaggtgtgagatgtttggttttctacctttataaagtttataaggagttttctttaagataagccttatgagtaatctatttaaggtatagcaaatagtgctcactgcatcagtccaaaaatgttttggcaaattagtttcattacgaagcgttcttgcaccttcaagagatctatttttcctctctacaacactattcttttgaggtgttcttggagttggaaaattgtggtttattccatgttcttcacaaaaagtttcaaaatgtccatttggaaattcaccaccatgatcacttcttattgaaactatcttgcaacctttttcattttgtaaaacattggctaattttctgaaagcactaaaaacatcactcttggatttcaagaacaaagtccatgtaaatcttgagtaatcatgaacaatgacaagtccatagtaattgccacccaaactaatagttcttgaaggaccaaacaaatctatgtgaagcaattcaagaggtcttgaggtggaaataatgtttttgttttaaaaaaagatttttgtttgcttccccttttggcaagcatcacaaagtttgtccttttcaaacttgagtttagaacaatccaagtactaagtcctttcttatgagcttgttcatatgatgcatgttgatgtgacttactcttctatgccaaagtcatgattcatcaattttactcactaagtagtttatgttatgaatgaatgcatgttctattgcaagcaagtaaatgtttccttttctttttccaacatgtattacctcaccagttttgccatcacatatcaagcaacaattactgttaaaggatacctttaatcctttgtaacaaagttggcttatgctcagaagattatgctttagaccttcaacataaagcacatttctaattttggttttgaagctatcaccaatattgtcttcttcaattatttttcctttactgttgtctccataggtgacaaatcctccttcctttaatatgagattagtgaacatggatttatcacctgtcatgtgtctagagcatccactatccaagtaccataatgaagctttagcttttagacacatctacaacaatcaaatcaagttgcaaagaaaggtacccaattaatgttgggtccatagggttatctatttttctctttttctttggaacacatgcattctccatttggcacatagaaccttctagcataatacttgtgtgatgtgtgacctttctttatgcaataatgacatgttacaaattttgatccttttttcaaaataagtcattttagtatgctttgttttttaaatccttttttgattcatccctctatagagctttttcaagagatctaccaagtaggagttttctgtttgaaaagtcatgcatttttcaagatggctctttttgaaatcatcaaattccttttgtaaaactttgttttcatctacttttgaagaagaagaggcacacacacaaccatttgctttgtagttgaaacaaatttttcatttcttctttcaagttgcaaagttcaacttgcattgaagctagcttagtggtatgccatctaaggttacctttgagcttgttattggagatagcaagtttttgagcctcctcatgcatttcattaaaaacatcaactagttgatcaatttcaggatttacttatgattcaacacttgagtcttcctcatcaactgttgatgttagataaacattggcttcttcattctcaattgaagattcagaagttgttgatgcattatcttcccaagcaatgtaggctcttttgggtttcccttctttctgaaaaatagaatgaattggtttttcctcagagtttttaaaatttaaaacaattttgtacacagcggaagactttgaaagaaggatcgtatcttaaccaattaaaatatcaaacttttaaaatcaacttttatgtcaatcaacccactcttgagcttcacacaatcttgtgatgttaacaaaaataatacttcaagaacaatatgaatatgaacagaaaattacaattacacacaagatttatactggttcacctctcaaccccggaggctacatccagttttacttctaatcaaccttgattagagtttccactataacaaaatgaatatctttacaagcaaacacagatctcttttacccaacctaggtaaaattcaaaatctaaacctatagacttctcaaaagatctaagaaccagagatcccttctctgttctacccactagatacctatctagtaatgctttaaagatacaaattgttatatcaacaacaaaccatcaaaacaaacaatttctgtacaaaacaacaaagaaattgattaaagaaagatatcacctgaacatcctcagtgaaatgaatgagtttaaatgatcaaaccagactgagaatgaatgccatctttcttgatgatttctttttgacaaatgaagctttagcaaaaactaatcatgaaaagatgactcaacacatgagattcttcatgattcttgaaaccaaatcaatgaatgtttctaaatagacttggcgcttttaaaatctcctgagagtgtgtatacaaggcttacttcgtaaaactaaaagtctcttctcacttaatgagttgtatctatttataaaaaaacagaattaactgactgtaatcgattattccgtaatggtaatcaattattctaacaaatgtaatcgattaaagttccaaaataatcgattaaagtgttcatgtgaaatctggaaaaattcttaaaaacaaataatcgattaactcatgtcgtgatcgattatcacagaggatctggattttgtgaagcactgaagtaatcgattaatactcaaataatcgattaacacggggaatgtgaaaaacgtatcaatgcttatttaatcgattacaatactctggtaatcgattaaaccagataaactttcttctgaaaattatgcagatggacaaataatcaattaatccgtcaggtaatcgattatcacagaacaacttaacaaagtcagctgaatgtaatcgattacaaatatttggtaatcgattaaagtgtttatatctttaaatgcagttatgcaaccaagcaattaatcgattaagtgtaaccagtaatcgattaaagcagtgaaaaacactttttatgaaaactttaaagctttaatgtcatgccaaatgatgattcatggaatatgtgtgacttaatcatgaattaataagctaatgtatgcatgacttattcagtttatgtgaggaatgagggattatatctttcttgaaccaagcctttaaacaaagtacatataccatcaatttgagtgggcatgtaaaatcaaaacttaagataaagcttgacttgattcttcatgatcatcctcaacctctgcatcatatctaacaccttcttccctttattttcacctaactgcttcttcaagaagattggacattcagatttgatgtggccttgctttccacactcaaagcatttgaagttgttgatgttgttgctattgtcatttcttttgttgaactttttgaactttatgttcttgtttttcggcatgaacttgccaaatcttttgacaattaggttcagattttcatcgtcttcatctccacttgactcatcatctttctcaacttttgaggatgtatctttcaaagcaatgtttttttgtttcttgtttgcatcttctgcatttgttagttgagacatttctaattcatattcaagtaacttaccaaaaagtgcagtcataaacatctttgacagatctttagattctttgattgctttgacttttggttgccaaggtcttgtcaagcatttcaaaatcttgatgttgagttcctctacatcaaatgttttgccaagaccgagtagatgattgacgatgtgtgtgaatatggtttagagctaatagatgtttctgttgtgttcatcttaaacatttcatactcatggatcaagacatgttttcttgatcttctgacttcatcaattcctttatgagtaatctccagcatttcccacatctcttttgcactcttgcactaactgttctaaaaaactcatcaaaagacaatgcagaggttatcatgttttttgctttaaaatcatactgaactactcttttttctatatcagtcattacatcccattctttgggaaccttttcattatcaataatttcggtaggtatcaaatgagctttttcaattgcattccatgcacatttgattgaatgaaaatttgcattctatttttccaaaaactgaagtgttctccctcaaacattgcaggacggttgagggatacaccctccttgaaggtaatttgtgtggtattcattttctttaaaagaaagtagtgatcttgagtaacacacaagaacctgctttgatactaattgaaaacagtatgaacaatagacaagaaccaagaggggggttgaattggttgttcttggccagttaaaatttcttaaacaatcagagttaaaattgatcatatcacaaaacaaccattgaacactttcaatcaatcaaactccaatctttaaagaatgcaatcacaacaaaaatgtttttgttgattatgaaaagttataccaacgaatgacaattaataaccacaagaaaagataaagaagaagtagtcaacaccaagatttatactagttcacttctcaacctagagaagctacatctagttctcctaaccaactagttagattcaactattaacaatttgtttcttacaagtttatacaatcactctcaatcagacctagattaagaacaagaaatctaactcccttagactctctgtgatcaagacatagagaacacccttctctattcttccctctagaaactcctattctagacaagctttaagaaaaactattgctctagttacacaaaccagaaattctaaaaagaattacaaccatagtatggagagaaacaacctaatgatccactatagatgattacaaatgattaccaaacttgaatcaaggttaaatgaaaacaatctcagaacattctctccaagtccttctttagaaagttgcccaaaaagaaatcctctcaaggtttcttgaagcttgaggatttgagggtctaacacagaataacttatagtatcttttctctctttagaaaggttatgaaattcgttgatatttcattgtgtttagttaaaacaagatgtttctatttatagacaaaattgttacaagtgttagtaatcaattaaattggtgtaatcaattaaaatgttcttgagctttttagaaaagacttatgaaccatcataatgtaatcgattatcacaggaagccttattcaaaatcgttggcaagtaatgtattaccatatttctataatcaattatcacaggaagtccattctgtgattttgaactgtgtaatcgattaccacaatctcgtaatcgattaaaatgttcttagatcgcaagtaatagattaccattgacgggtaatcgattaaactagtgagaaaatatttttccaaaacttgaaagatggaatacttggctttttatgcattcatgaaatccttgtgtttcagaaaagctttttatgaaagttatgcttttgtgaaaacatgaatgcaaaaacatgaatgagttttatgcaatggatcatatgatggcccatcttagacatacacaaattacaaatgtcagtcaattgaattggcatgtaaaaagcctaaacatatcaatgcctaagaacctcaacttcattgatcccgtccagctccccttgagtctaacaaacgtcctactaccaattttgcaacttccaccgctacaccctcctctaattgggtgcttgacacaggtgcaagccatcatgtgacaagtgatcttcctaacctcagccttcactcttattatgatggtctagatgaagtaataataggtaatggtacatgtttgcccattactcatgttggttctaccaaacttcccacccccacctttgcctttactttgtatgatgttctgtgtgttccaaaagcacatcataatctcatatccatttcaaaatattgtcaaagcaataatgtttatgttgaatttcacccttttatttttgtgtgaaggatcgtacaacaggggcgacattgatgcacagtcaaagtagtggtgacctgtacacccttcaacacacaacaaaacactcatcacccactcaagcaacaacattatccaccattcgatcctctcgactcctttggcatgctcgtcttggccacccctcctgaaaattctacggtaagttttcaagggcaatgacttcatcaatatgcccaaatctccttttcattgttcttcttgtcaattaaataagagccataaattaccgtttagtgaaccctctataacatcaaactcaccattagagcttatgtattctgatgtttggggaccttcaccaattccctcaataaatggcttacattattatctcatttttggtgatcatttcactcaatatgtatggttgtttccattaaaattcaaaagtgacgtgtttgatgtttttcctaaatttcgtgatcaagtagaatctttctttaatgacaaaattcattctctttacaccgatgggggaactgaatacataaaactcaaattattctttcaaaatcatggcttttcacactacatttatccaccctacaccccttaacatgttggacttgcagaaagaaagcaccgccacattgtagaaactggtcttgcattacttcaacatgcctccatgcctccaaaatattggtgttatgctttccagacacccatgtacctcgtaaatcgcatgcccaccccaaaccttcaaaataacacacatttctccaaactctttcacaagcccatatcctacacaaatctaaaggtatttggatctctatgttatccttggcttcattcatattcaagtcataaacttgatcaccgcaacactccttatgtctttcttggctactcttcacatcatcacacctacaaatgtcttgacaatgtcagcaataaaatttacatttctaggcatgtggtgttatttaaaacataatttttgttctcttccccttcaaaaggcacaacagcatcttcactccctgacctcacatcataattcactcctcaaaattctccaccctccatgacacaccaacaaacaaatcccattaaaacacttgaatatcatcccttaattcaatgtcacttgtcccccatctatgggaacccacacgcatcaccctttcactcaacaactccactacaaccagcccaactaccctccacgtcaacccctattgatgccacaccaacaaatgtcactacctcaccatcctcaaatcactcaccacgacttgattgtgcatcaacgctagctccctctaagccagttactttatccatgcataatatccataaccccaacaaaaagtttcttttaaccaccaagcatccccttccatccaccattgaaccaacatgtgtctctgaggcaatgaagtcaccagaatggcgtgaggctatgactaatgaatttaatgcattacttggacaaggtacttgggatctagttccaagagatcaatcacaaaatgtgattagatgcaaataggtcttctatatcaaaagaaatccagatggatcaatttcgaggtataaagcgagactagtggccaagggattccatcaaatacaggtcttgattatccacaaacctttagtcgtgttattaaacttgctacagttcacttggtactctctgttactctccaacatcaatgggccattagacagctggatgtgaataatgtttttctacatggtcacttgaaagaagaggtgttcatggatcaaccgcctgggttcatcaatcctgaatttgccaatcatgtttgttgtttaaaaaatcaatttataggctcaagcaggcaccctgggcatggtccagtgctttagactcctttctatgtttatatggttttcatgcctcaaaatcagactacttttttcatcctcaatcaaggtaacattctaatttatgcaattgtatatgtggatgacattttaattacagactcatacttcaaacatccaacattgcatttcttctttggcccaatagttttccatcaaagatttggattctcttcattatttcttgggcatcaagactattcctaccaagacaagtcttatactcagtcagcacaaatatatctgtgaccttcttgaaaggacaaaaatggcataagcaaaagaggttcaaactctattttccactagcacgtctcttacattaaacgatggcactgcaattgtagaccaagctcactatagaagcatttttggtgttctccaacatttatccatgactagaccagacattgcctacagtcaatcggctagcacaattcatgcacaaaaccaccattatgcatatgacatctctaaaacgcctcctacgatatctcaaagctacaatagttcatggacttcatctccacagagggtcttcaccgtctctttatgcctttagtgatgccaattggggaggtaacaaggaagattatacttcaacttctgctcatcttgttttctgtggaaggaacctcatctcttggaaatcttccaaacaacatgcagtaccttgtttatccatagaagctgaatgtcgatccctagcaacaacgtcagctgaactcacatggattcaatctttactttctaaactttgcatccaacttcaacagatactgaacatatagcaattgatgtgcactttgttcgtgccctcgttcaacaaggaattcttcgagttcagcatgtctccaccacgaatcaacttgtcgattgcctcacaaagcctttatccaggcagcgtcatcaccttctcaagaccaagattggtgtccttgattgcacacctctcttacgggggcgtgtcaaggcaatgactcaacatacaaaaggaaatgactcagcacacaaagatcaattcaaatccactaaatcataggcatctgattgcatctaattgatcgagtcataagagttgtttcatgtcatttattttagattctagtcaatgatttgtttgttgatttataggaactaatttagctaattagttttaaatacgaatgtaaataatagctatgaaaacctctatatattggtactgtaattttttaataataaaaatcaagttgaacccattctctatagtattgtacgttttggcatacagagagggttaggagttccccgctcctaacactttggagttttaatgttgaatagtcaaattacaactcgccgtaatgggcgtctaaccactgccaatgttgtattcatgattaattatgttgttgagggaacgatattgctccctcactatctaggaaaccccgactgaaagaaattgattaaatcgctcaaagagcatattttgttttggtattgttatccataattatataatttgtgatagaattctattgtgattaaattgtgaatggtgttatgagatgattatatgcttaaattgtgtttattgctactcaaaatgaacaaaccttgtggtggtaaaggaggatgtgtataggaatgtgattggtatgtgagtacaaattggcatatacatttaatgtgtatatcaaatggcttgtggattctgatttttgaatttaaaccaataactgccttgagtatttaagctgaaaactgcttttgagtatcttataggccccgtttagggtggttttctttttccaattttgaaattattaaaaattaaatccagtttcagttttgagtgttgagttttagttttaatttgaaattttagaagctattgtaagttcctcactgtcactacttagtgaaacccatctctatcgtcctcaactcatcttccttcaagaaaccccaacatcaagtccaccagctcttccaccctcccccgacgcctttcccctcgcaattcgacaccttcaacatcgccggtcgaatcaacatcctcgccaaccgcctcagcctctagtacgattacgcgcccttaatcacttccctaatccgggaagacttctcccctctaacaatcgaagaaaccactagcatctccaacgtcgagtagaactgcctcatcatgggcgtgcatgtccgcaaccccctcatccactctaaggtcgaccctgacctcctccctgccttcgagaccaatggagaggtgaagagggggatacagtggatgcaaggggtgttgcaagtgttctgatggtgaggctgagggttggggaggtggcagagacgagtttggtgatggtgttgcaggtcactgtagtggaggatagatgaacaacagagtgtgggagagagtagttgagtgagaagtgggttaggataaaccaacaactaaaacccacaaacctatttttattgtttttgacataagttgaaatatgttttgaaaagaagaaaaaattcaactcaaccattttagccaaccatgtttcagtttgtaaattgtattttaaaactgaaaactgcaaactcacaaccaccctgaatggggcctcaataaattgattaggttgtatgttaatcactagcgtaaaatatgaaaatttggattttagatgcatatgagcatgtaatattttttgtgaattggtttgcatttgaagtgtgtagaagatgtaaagcttgaatccctgattttgttactgcattatgtgttttggaaaccaagtaaactagaaattttatttccaagtaactggaaggaatttagaagggaaggaatgatttaaaccatttaatattatatgcttaaattgagacacagcaacagcctctaatacgaactacactgtccttgttgcagattttggtttttcatttacttcagtagtgttttagattggtgtgtcctctttgcaattccattgatctcatgccatttcgatttttgcacaatttatagcaatttttacactgcaacatgtcctatcgattgtgatttgtgtagttgcgggataaaagcaataaactgtaccatttgacagggattgatactttctatgtatttttagtgagaaaggaatgtgataggggttctatgtcttttggaatctctgatttttcatttttagagaattgattatgaattttataagatgagtatgagatggaataaaattctgcagattgtttttctttggagatggaataagacttgatttgaggaagttgtggtagtaaaaaaattataggaaaaattccagtgctttcttgaaattttaggaggttctttgtaaattcttagccccaagtaatgagtttctgtttttgaggttttctctcccaaccatttttattgatttagattgttttcaaactaatggatgattcttatgtgtagcttttggttttagaaaatttatacttagctccattaatactacatatctatatctatgtctatattgatatgaacctattatcatgttacttataatttatatccaaaacctttttcttttaaaattcatattttatgttttaaagagtccttaacatttattcttttgaaggcctatgattttattttatgggtgagaaaaaaagcttgtcaaatgaaaaggcaatgatttacaaatgagtggtaagtggtttcctagaaaatttattccatccatctcatctctaatgtcaatagaaagaaattgaaataaatcatgcatcacggcatcccaagacttagtgtccactgtcaggcttagtgccaccctagacttagtgatatcccaggcttagatccactaccaggcttagtgttgcttcaagtttctaagttattccacggcttggtgccaagggaaccatataaatactatttgggtaccccttacatgacatcatatatgaaagagtagtaaagcctgactcaggaacatgcaatgcattcatataggactactaacttcgtgagttttataattgattgatatgtgcactacaaaaaaaaaaaccgtttttttcgacgaaatttttctgacggacaatatttcgtcggtaatttcagcattttcgacagaaaataattttcaacagattagtttccgtcagaaatctcggaaatatttagatttcagacggaaatattcgtcggtaattattccgtggaaaataattcaatttccagtggattttccgacggaaatatttgtggaaaggccaaaacaaatttccgacagacaaaactccatcggtaattttagcatttccgacggatatttccatgggtaatttccgacagatatgtccatcggtaattttcgacggatatatccatcagaaattacccatggacaaaattccgtcggtaattttagcatttccgaccgatatttccgtgggtaattttcgacggacaaaattccgtcggtaatttccgacgaacaaaattccgtcgatatgattaatattgtctccctcctatttctcttgattttcttgtctgtaatataaggcataaatattcttctatactttacttaatggaattgtaaagaaataattcatattttcgacggatattttcgtcggtaatttccgacggatatgtccgtcggtaattttcgatggatatattcgttggaaattactcacggaatatttcgtcggtaattttcgacggacaaaatttagtcggtaattttagcatttccgacggatttttccgtgggtaatttcatacggatatgttcgtcggaaattactgacggaatattccgtcggtaattttagcattttcgacggatttctccgacggaaaatattttgtgaaaaatttatgaattttccgccgaattatttaaattgtattttaagtaatttacatttataaattatttactttgcattaaacatgtaagatatttgctttactcatttgttttgatatttttattattttctacaaatttaaaagagatactattatacttgtaagatgtaaaaccatttatgatattattgtaaataattttatttaacaattttttattcacaatagtgcaagtcattgtctaataactaaaaggaaggataaacaaaaatttcatcataattaatatttagaggataaatatttaacaactatattttttagtgtgtgtaattactttaagtaagatactagtgttgtttattaaataattattaaatttatttttttttaaatatattaataataaataaataaaaattttaaagaactaaaaccataacttcaatgaatcctaccatcaaccaatgtaggagtgtaaaaaaatgatttaaacttaattggttttgaattgaactttaatcaaatttatttaaagtcaaatcgactaatttagaatgatgtaaattatgattttcaaaacaaaatcgatgaaaaataatttatttacaactaattcagttaatcaaaattcattcacaatcaattttaaatcgattatttaaaactagtttaaaagaaccgattcgtcaaatagttcaaacatttgaatttaagacccaaacatttgaatttattttaagaactgaatttaaatacaatcatcggtttagaaatgagaatactcaactacttaggtcaaacaacatttgatagttttgtctctttacaaatgattatgaatatgtagttctttgctaaggttgatgggtctttatcttcttgtttaatatccttaaatataacatcgacacaccaactattgatttaaaatattatcttttaactataatttgtaattttcatgtatatttatgtattttagtatcattttacttataataattataaatttttaatgggaacgtataaatgttataaaaaaatccatatgaaagagaaattagaatttcaaaggaacatgtgcaaacatataataacccagttttctaaaaaaaaataaaaaaatctaaaaaaaatctcatgctaacagcgtgggaacggcacgattagcgtgggatgcggcaccagtagcgtggaaagtgacgttagcgtgagattgcaccagaaggctttttcttgcggttatctggcgatattagcgtgaaaatggcgctgttagcgtgggagacgctccagaggccatttcatgcggttttatggtgcgaatagcgtcattttggcgtgagtagcgccagagatacgcccagttggcgcagttagcgccacaagtgcccaggatgcctgttgttacgtgatcttggcgtgaatagcgccagatatggcgctatcagcgtggggacgcgggcaggacaggtataaaaggccattttttcgaatttctggcccaaaaccctcttcttccccttcctctgcgtttttcctccattgatgagcctttgagcttcatacccactctatctttgatctaaacactcccctttcaacatagaatttgtagggaaccctcctataagctagaatccttcatcctttttctctaaaatctatcaatcggagagatccctttctctagggaactttggaaaagcttgagtttgcggaaaaagacagcgattcaaggacgctaaggcttgggaaagtcatcctctagcattccttgaccgtttagaggtaagaaactcaagttttagcgattgatttgtgagtttgattttgggatgaatagtgacccacttgagctagagctaaaattagccttgggtcctttagaaatatatgtttagactgttgttgtgatgaaggattagctttcatatgttagtttcatgaactttggttcttggctctgagaaatgcatgtgttgatattttgttggtcaattaatgattatagaacatgcaagagccttgatacttgctctatatgtgcctgagaggctatatgaacggctacattgtgtgaaagaaaccattcaaaccacgttgtgcattcttgagtttttggcctgtatagagtttggagctctttgttttggcttgtaccaagtcttgtggagattctaatgccttggctaggctaagatagaccactgtgggtctatgtgttgttagtgatttggttggtcttgataatgaatcgataatatattttatcacaagttcattttgctcatttttatatggtaatggtgataatagttttataacagttgtttttgtgttaggtaacctatcatataaaatgctttcttgaagatttttttttgtgaagtctttcttgaacttctgttagtttagattttagagatatgagatgccatttgtttgccttcacacacacacacacccccacaaacacacatattgtctgtgattattcttttatgttctcctttgtttgttggtttcatgcgttgggtccaagctgtatttcgcttatcagatagttccaactcttcttcatgcataaaagctgaggccaataatcttgacagttgccaatatggaaatcaagcaaaatagtttgaatggtggtttaaatgattctgcagttgacttgtctgagggcatggcagttgacatgtttggagtcttaccttccaacaaaaatgaggtaaggttctctcctttgctcagtcattgctggttctctcaagatcttacaaaaaaattaatcagatttcatgcaatcattttttacttagtatctgaacatatgcgatctgagctagcttcttttcagatgttctacaaattttcttaaatggccatcaattgaaatttgttgacactgggagcgaagtttatgtcttagtccatttgtccactgatacttttggtacattagatactcaattctcaactaatttaatgcatcatctgcaggtctacaaccttgattggagtaacaatgtgaatggcctattaagtactcatgggtactcccaaaatcagataatggtgtggaaatatccatcattatcaaacgtactttactttcacaattctattagtatgtttaatttacgaagatagatttttagctgtgtaaatggtttcttttttttgacagaaaatgacagttgtagtgttacagttttagcattcttcttataggatcaatttctttattagaacaacgaagaacaaattcaaaaccatatggatacttggaagaaggaagtcagaaaataagcaaaaataatacaagagtgacaaatgtaataagattgaggaagatacaacactgagcaaagatttgttccacaaatgcttacttaattaataaaccttgtcatgtcctatcttaataagtcatttttcatgggaaaaatatgttggtgtttgttttatctttctctaacttgatttgcttataaccagtttgctagagattcaaaatgctcaaggactagttgatgtattcatagaaatgcttagccttgaatcctaaagatgtgaggtgatattattatttctcgttcttttctgctagcttcattcttgaacctctttgttttcttgtttatgaagtattggtttgagcattgaaattgttgtatttccttatccatcttttcatattctactagtcgtgtcgtgtggtactatggaattcatcccatatattgattacaaccacgatgcacatcttaagaaatgcctgtgaatatgtaaaataataacttttacaccatgcactgctattatttttttaaaaatctctttgattaaacctgagataaatggttcgtgattatttatatctttataagtattgctgcatcatttggaggatcctagtttcacaatggctttaccttctttcaagaatggatttgaatcatacatgtattgcctagcattgctaaagattgtggccttttaatttccacggaattggccgtcggtaatttccgacggattccatcggtaatttccgacggacaaaaaatccatcggttaaatttccaacgaccattttaccgacggatttttgtccgtcggaaatttgacattaccgacggattttttgtatttccaacggattttggccgtcggaaataccgattttttttgtagtgatgtgaattgcggtgagtttctatgatgactagtgtaactattactatctgggtttaaaagatattaatctacttgactatgattattaatatatttgcttgggatatacttgaatgtttttgccgatcttatagtctggatgtacaacttgatatggtgcatgtgctaagggactttcataatatatgtgtatttactctcctgcctctatcatactttactatcaaacctcacttatccttgtatgtgttttattggttttgcttggtcttaagtagtgaacaggcgagaaagatcataggagggtcacaatggtaacgcagatggttgttagacatagctacaaagggttatatatatatatatatatatatatatatatattgctagtgttttgttttttatagtctatatgtgggagcccagtgctctagacttatcctcttccttgttataaatattcgtgacttatatagtgggtattcacattccttccttttgaaaaacttacatctcccaaatttgtatatttaatgtttttagtacccacgaatagtaaactattttgtacttggactttctcctaccatattctctcttatatagatatatcctactttgtacgatcttcagtcagatatccaagattttgagtgatcttaaaggttttggcattctgctagccttactatgctccacttgaataacataagtggttactagttactagatatgcttgaatccttatttatcttttgttgtgtaaattacaccaattcttatgtgtctaaaattaattcaccaattattctttaaaataagaagttccttgtttacaaaatttaattaagatcatgtccaaatcgcgaaaaattccccatctttttaactttttgagggctccctacaatcgttactattaaattagttattttaaaatttaaaagttaacagaacattcacatttctaatgaaaaattaaaaaaaaatgaccaaaatgatacatttgaaaaacataaaggactaaaataagacttttaaacttaatgtagcaaaacaaaacaactataaaacataatagaccaaaagtgacattaagcctaataataattaacaataactagtaaaatcccaaaaatgaatcatgtaaaaatataagacatttggagttatatgcctggcatgatggttaaaggagaaagggagaggaagagataatgagtttgaatctttctgtaacaccccatgtgcacccggtgtattaacattattataatatcagaatagcataaaattctatggtaaagcaaataaagctgcggaagcatgtaaagatcgcatttcttgagacattatgtatggtacaataacatcagcatgaataaaactcaaacgtatctacatttagcccttattgatccagataaacaaagccaaacaaaacaaccaaatccaggaagatatcaaccatatcttcatagatatgacaggagacagaaaattaccacaatatacataaaccacaaggagcctcaaatctttcagactccggtcaacaagctcctaatgctcaactctggtgtgcttctcaccataggatctatcctctgtgctctacacacctgcaacataaaccccacaaggggtgagatagaaatctcagtaaactcagggttcttggagatctttcctccccctggttcactttcatacaataatatactagcttggcttaacagtagccatctcatctctcttatcatataccacatatactatggttcatgcacgcctcactgggttggtgcactcatcattggtattgagagaccacttgtctagtaaatagactctctcgcaagctccatgagctaaaacctcatctcatctatatatacgtatatcagccatttaggctttctcatttcatatcacatctaagtcatatatatatatatatatatatatatatatcaaccacattggtaacacatcatactgactgagagtacacccatcccgtggataggttctctgtaacctagtccatcgtctggggatgatcatctgacaagtacacatccccagagtctcactggacactagtcaatacctgaggatttcatcatacaatcagccttcacggctcacatgaacaagctgcatgcacatagcagcctaagacaaacatatacaatcaacacacgttgcctgagagagctcatccactgaagggcacattctctcagggctttccaccgagtacctgaataggatcatctactgaaaggcacatctacttaagactcgctctgttcatgcctgaggaagatcatccactgaagggcacattccctcaggactttccactgagtacctaaataggatcatctactgaaggcacatctattcaggactcgctctatccatgcctgaggaagatcatccactaaaaggcacattccctcaggactttccactgagtacctgaataggatcatctactgaaggcacatctattcaagactcgctctatccatgcctgaggaagatcatccactgaagggcacattccctcaggacttgccgcataatacttgaataggatcatctacttaaaggcacatctacttagggtttacatggacgcctatggataatcccaaggaagatcatccacttaagggcacattcccaagggtcccatagtccactattctctggccagagaattatcacctaatctcataatcaatacaaagcatgacactctcactgtgtcaatctaacatcaataccaacatgtcatcaaggcatttcctcaaaatcacagcaacacacaacatcagtgcagagcgtaacactatcacagtgttagcttatcattcatcacagaacacaatcatagtgttcatcaatcattagaataccacgggtatttctcttataccccaatacatctcatcctctatcctagtgtttagttaacactaattatcatatatatatatatatatatatatatatatatatgtctgatgtacctatcagcaagccaatatcattcctaacacaatcacagtgttaggtttatcatcaatcagaacactaacatagtgttcattatcaacatgaagtacataactaataaaacagtgacccccaagcagggaaatcattccaaagaacactgagcttacctggcatgaccgtgttttatcatactcctcagatgagtggtccatgctattgacacctttgtgtctcgccctcttaaaactgtcgaggaaggcccaatgcttgtctctccaagccttagcatccttgggttgccttcttttcctctctgaactcagctttcctcaaggttctcaggaaaggggttttctctcaaatcttaagctggaatttggctcacacaaggtcttaatcttgtttattaaggactaggaggtgtttggaggaggtatattgaaggtatggagcttccctagctcatctatggctgcctggaccagaggaagaagatgaatagtgttttccttcccaaaaatgcgaaatggccttatataggtggcctgccagaggtctggtgctgatcgcgccacctctggcgctaaccgtgccaatatgtcggtatatgtggcgccaacagcgccaccctcgcgccatcagagcggcaaagcagaaaccttggcgccatccgcgccacccccgcgctcttggtgccaaactccagaagcagtggcgccctcagcgccacttccgcgccagaatccagaaacaatggcgctaccagcgtgaaccctggcgctacccgcgccgcacctccaacatggttttctcatgaagggctctggcgctaaccacacggcacctcacgctgaccacgccagagctggggtattatactttccctataacattctaacaaaaactaacaattaacatttgcatgtaaaaaaaatgaagaaaatacatttgtactaatgtcattggtaaggactaaggtgaaaagatagcacaatatgggcttagtttttcttgcactccataaaagcacttgatatttcctttgtattttggaaagtccatttcaaaatttagattgaactttttggaaaacaaaggaagtgtttgttggttttgaatttgtattttagaattgtttgtggagtgaaggaagaaacacccccacaatatgttacccataataatatggcagttgcttcctgcataattaatttagaatggaatgtaaaattatattttggattagcctttttaaatggttaaaaaagtgtagaaagcaaattttaaggtagaggaagcaactaactaataatatttctttagtacccaattcaactcttcaaccgatccaaaagggcagttaccttcaggacagctaaggaaacaaagcctgttatacttcttaggcaaaacaattaaaatattattattttaataaaaaaattatgaaaatatagtcattttgaaccaatttacgaatgtatagcactcaatcgtgccccatgtgggcagtaagtcacgtcttgtgaagcactatagttgcaaagtggcgccccatataggcgccacaggtggcgcctcatacaaacaccactttgcacctgtaccgccttcctggggcgcaacttcctcccttacccatcccccatgcgcaattcagtcatttgccttctatttaaatgcatatcctcttcacactcttcacaactcttcttcatcatctttctactcttagatatctcaaaatttgcttctttatactttcttttgtgcttatttggttatatatataaaaatgtgtacacattttgattttgttcatattgttctatattataatggtaggaaaattgagggtcgacttggtgaaggtgagaaaaggccaacatgtatcaaacgcaactcaactattgacgaattgcatcagaaaatttgtcaaaaattagttctcaaaggtaatcaatctatcactatggtcacaacaagaatatggtgtgatgataaatatattagcatgaaagtagtgaacgacgaagacgtagaaatggtaagaagagaattcttcaaccagtcaaggaaagatttcttagagttgcacgtggatattgatgaagcagaggatgtcgctttaccaatgaggtcagttgatttcaattcttcccataatgcatcaccatctgctgctccacttgttaatttgtctatggaagatgaaaatgaccctacttgggttatggatgacaatattgaccatgatgatgatgaaaatatcgcaatggaagatcgtcttcttaccgagaatgctagtgcttcggacaatgatgaggatgatggtccaagcgcaactaaaatacaagtacatcaggatgtgggggagtctcaaatccaagcacatgaggatgcgggggagtctcaaattcaagcacatcaagatatgggcgagtctcaattaccacaacattctaaaggtgtgataccaaacaacacttatttacatatatgtctggtttttatttatgtattttttttttgtaataataatgggaatttgcacatgtaggtgtgggtaatactacttttagggatggaatcccacattacacatacattgattgggatcatccaagagaacaagattctagcactggttctagttcagttgagggtccatggatataagggaataagttgtttgttaaataggaatttgcataaaaaaaaagaggtacagatggcaatcaaatggaacctcgtgaaggagcatcaagaagctattgtggttgaacacatgcctacaaagtaaagcatgaaatgtcgtgcgattgaccagaattgtctgtggagggttaggataataaaaccaacatacggtaaaagatggatggttaccaaatggggtagggatcacaattgcttgaatgatcacatttctcaggaccacaaacagcttgatgcttatgttattgcttcactcgtagtaggtacgttattggatgacatgataattataagaattaataattttattattatgattaatgttaatgttacattttttattattagggatggtaaagcatgatccatcatgttcaattggactagtccaagagaggataacccagtcctatggatacgaagtttcatatagaaaggcatggtatgcaaagtagaaagcaatggcaattatctatggtgattaggagacatcatacgcattttttcctaggtggtgtgactatatgcttcgcttttcaccaggttctttttatcatctttaaacaaaagattattatgtggctcatagaatcgttcatggaaaacgtgtgtttcaccgcattttttggaccttcagacaatgttgcgaggctttcaatttttgtaaaccggttattcaaattgatggcactcatttatatggcaagtacaaaggaaaatgttgattgccacagcacagaatgaaaataatgaatgtttgccacttgcatttgccattgttgagggtgagacgttggaagcttgggaatactttatggataacattcgcgctcatgttacaaagaagacaaatatttgtcttatttctgattggcaccaaagcatattatctacagttgagaggcaccatgggtggtagccaccgcatgcatatcatgtgtttttccttcgtcatattgctagcaattttaatcaaaagttcagaaatgaaaatttgaagagagcagtattgaatttaggtatggtcaacaacttcatcttccaattttgcacgtattaatgaattttaatgttattaaaattgtgtgtaggttatactccttctatgatcgattttgaggtagccttggcatgttttcatgatgtgagtcttgaggttgcaaactggattgataacatccccaaggaaaagtagacacatgcatatgatgtagagggacgaaagtatgggcatatgacaacaaatttgtctgagtcagttaacagggttttaaagggtgcaagaaacatgccaataaccaccttggttaaacacacatatagcagattggtggaatattttgtatgcaagggtcaatcggttgctaagcaattgcaaggtcctcatcgtcgttgcaaaattgtggttgctatgttgaaggccaatgagtccaatgctactgatcattatgttcgtacatataatgttgaacaaactgtatttgaggttgacgatggctatgagaaatcgtattctgtaaacctccctgagtagttttgtcaatgtgggaaatttaaggcattaaagtatccttgtagtcatgccgcagcagccgctttacatgttcatcgggcaccgacacaatatgtggatgacgtattccttacaacaaaactggtaaaagcgttctcatttccatggcatccaattggtaatgagcaagcaattccacctagtgcaaatccagtggtcatacctaataattctaggttgtgtgcaaaaggtcgtccaaagtcaactaaaatacgcaatgagatggatgaagttgaagctagtcaaagtcgtattaggtgtggtataagcagattacctggtcataaccgtcgaaattgtcctagtcgtccatctacctcatgattttattttcgatatgttaatgttttctttatcttcttatatttcataattgactgtctttgaggttcactatgttgttatttattgctttacgttttaacatagtgcgtaacaaataacaagctataaaagcgataaacatagtacataacatagtccatgacaaatataagcgatataaaaggtccataataccatacagtccataacatagtccgtaacaaacaataaatacaaaatagaaagtctatgaagccagaggccactgctgatgacacgcctgacgatctggcaatctacgtctaccacgtccacgtgaagactgtggagcaggagcaggagtagatgctggcacatggtatggagctccagtggcctcgactggcagctctagacgatattctgactggtgtggtgaaaaatctatatggctatacatgccctcaagagctatatcatcccacgactaagttcctaactactgctcgctgcctaatccctggaagtccatcggtgggcactctggctgataatatgtatgagcctccagctaagtaggctcatgaaatgtttgttgaacaccatactcatgacctatgaagggtgacctaaaccatccacccatgcgtggcctgggtgtatgaacaagctcaggaactggtggaataggtcggcgacgacgtcctatccctcgaccttctctcgcacgatgcccaatgtcgatagacaactgtggctcctccggaagctgggtcagggatgcctctggacctggctcctccacccgagcggcctctctaaaaatagctattaggcgacctatttcctcgtgtacatattccaaagtgtggtgcggaaattgctcaggtgtggtgacaaaatacaaattctccagaccatcaacctatataactcacaacatatatacataaagaaaaatatataataataataataaatgatttcgagtaaataaattacacaatgtcctaatttggaagcccgcttcgtgacatatcgcttgccgcaaagtctataccaaaccatgtactcatggttgggtgacagaagaccatgtatttcaggaggcacttcaacatgttgaactctcctattccatctctctataaatttccttagcctacgagcccaattttcttggggtttaccccgaaaggtataatcatgcatacctttcaattttccaggcctgtgaggtatcggttgatcccacccaaattgcctcatgcatttatcaggctgcagatactcagcaatgtgaaaacaaataacaggtgtactaaccatccacaaatgttttgtgttagagatgcacccaagaaattgtaatctcgataaggttgccaaaccacctacagaattaaaacatatataggagtcaatcgcatattcacatccattttaaataaatatatttgattcaaaaaacatacctcatctctacataaggtgtctagtctgtctcgacaccaattaagtgagttcattatgaagtgacctagagcattaaatctaatttccgaattcaacattcaattgttaattgcagtacacataaatacatggtgatacaatcctaaaaccaaagcaagtgaaggaagacttggaattacacatagaggcacttcctttggtgattaaagggccaatgacaagggctagggctcaaacactccaagatcatatacaatccaacttatatctcttggagaaccatgaagaaggcttcaaaatgttgagcttatctgttgtaatcgattacgagtagcctataatcgattaaatacacttgtataaatgttagatttgtaaatagctatgttgtaatcgattattccgtcttgtaatcgattacatggaagtgggagttcttgtgataatcaattatttcattttataatcgattacatggatgtgggagtccctgtgataatcgattatttggtgaaataatcgattactttgttcgtgaatcagcttccaggcctaatatgaacaaataatcgattaccaagatctggtaattgattatttgattcaaaataatcgattaccattatgaaataatcgattaaagtcgttccttctgcagaggtgctatttttagatataaaagatgttttggaaagcttgtcttggaagctacatttgggtttcatttaggacgcatttacatttcatttagcttgtagattcgtggtctatataaactacatcacaacagattgtaaggactttttgattgaatgacattagattgcactttgtgtgtgagaggttgagagttattctcccttgttcttagtgaagaacttcttgtttcttatcaatagcttctgagctattgtggtgattcttgcaagacttattggaattcctattccatggtgtcaatccaaatccacttctattcttcttccattattccaattcttacattacaaaaacctaaaaagttgtcataaaacagagcattcatactctgtttttctttcaattgaagaattgattccattgcaaggaagatcagggaaaataggacttgattcagttcaggagtccatcacatggtgattcaagtaatacaaaataaacatacttgtgtccgaagtggcggtccagctcatacgaatcagacaaagggggagcaatgggtggaaatctgagccacgcccaaatctaaagcaaaatagtgcaaccactaatgtcttttctctccgggtctatacaatcgcactgtctaaacaggtatgtcaaaaccgcagacccccagctatatgaaccaatatcagcaaaattacccacaagtaaggaaatgtagagacatcctactacgctctcccctcccccccccccccccgatctgtcgcaaaggatccaagatcctaacatacgtgcaatgtgagccttggtgaagtatatcacattctaaggattaccagcagctacatcccatgtgggatacactctgtcaaaatatgatagcttcaaattgccagaggtaaactcagtggctgcattaggcaatcctagtatacctgcgacattttgcaatgtaattttcatctcaccctgcggcatatggaaagtatatgtcgctggcctgcaccgctcaaccatagcactgataaaggcagcatcaatctgaaaaatataagtcacttatcaatttataagttcaaaatacactaatttcaacacagtaaacataacaatatttgtaaatggatacctgcatatatcacatgcgagcaacatgtatgaaaccatcctgagtcaaatactgtgctactaggtctggaatatcatcgggtaggggtccaccactatgtctacctgtgaaatatgggtgtgctatctgtgcctcctaagtatatcccatttatatggtccgggaagaacatgcgttatgggatcgataggctcgggctcatggtcagatgcagaacgaggtgactcagatggcgatgactcggccataatatgctacacattttataatcatattatcataatttatttaatttcaaataaatattatttttaaaaattgattatgtatgtcttaggtaggtccttaatcataacctaggtcactaactaataatattccaagccaataaacatgttataactcactaactatatcgctaaactattttttaagtaactatttataatataagtcactaacaatttcctagatcaataacaattttctaagacaataatataatatatctcatgtaatttaaaaagcaaatattcaagcacttacttaactggcagagcttcgctacgccaagcctcgaactcaaacagaaaactagagagaagttagagcaaagtgctagagaaaaggtagaagttaaaacgtgaagtgaaaaagtgaacttagggtatatataggggtgcaaagtcgcgtctgtattaggcgccacctgtggcgcctatatggggcgccactttgcacctattgcacctccactgggcgcgactggtggcgcccacctggggcactgctgagtgctatacattcgtaaattggttcaaaacgactatattttcataattttttattaaaataacaatattttaatttttttgccatacttcctgtcctcaatatgctagagggaaaataaataataatatttaaacactttatatatatatatatatatattcattaattaaccttattattttgtttatattttttatcacataatattatctatcatacttatacttctcactataggtaccaattagtacttaggtatgtaaggatgattttccaaataaatattcacttgaacatactgagacgagacaccattcatagttccttttgaggatttgttttccacctcccatgaaatagttgacaatgaatcctgaacttagaaaaaaaaaatctagtcaaaatagagtaatagactcactaattctagatactataaagaatataatattacaataaaattaaaatccagagttgaacttttattagaaattaaaattaaagaatataacattatcttcttttcatacttttaatattagatctatttgtttagattcatttgtcaaaaattattttttaataaaataaatatttttctaaatttttatgtttatttaaactgtttctgtttattttaagtaaattttacattttttcaaaaatgtttattttaaaaaaaatcacaattgttttttaagttcaaataaactgacccattatgctgaaagaaagattagtaaagaatgaaggagtggtacttgttccctcttggtccatctatttaaagaatgtgaaaagattgaaataccatgcccagagaagaaaatggtttgatccataagttaagacataaataactaattttccatcaaattaaatattgaagaatgttgaatttataaactaagagtttgactaggtgaggtggctaacattcaatgattagtgaattttggttgataaaagcttggataaatttgggtcaaatcttttgtttcttcaattccataatgtaggcgtttactttctacacttcatcaccttagttggcaatccccttcctgcgaccctcatatggttatggttacaaatcacttgatgacagttggaaggtgccacttccagaaatggaagataagcccaaaggaagacaccacaaagggtgatggacaactcctaataagtttgatcgggttcagcctgaaacctagagaatactctcacaatacacaagtatttttctgaaaattcaagtttcatccaaatacatttgtttctaaggctgaagtccaaatattttagtttcaagagtggacaacaatgcatgccttctagataatgcatcaataacaatgttccctttcccccttttatgttttatgcatatgggaactgtttaacggacttggcatgtcttctgtttagctttccttgtcctttcaagtatttgagggattcatgatcactacgaattacaaattcctttggcaaaagataatgctaccaagttttcaaagtgcacaccaaggcatacaattccttatcataagtgggatagtttatggcaaccccgtttaacttctcactaaaataagcaattggatggcatttttgcatcaaaacagccccaatacccacattagatgcatcacattcaatttcaaaatattttgcaaaatttagtaatacaagaatgagggcattagttaatttacgcttaagtttagcaaacatcttttcttgtttttcaccccatttaaatccaacatgctttgatctcattaagaggtgcaaccaaggtactaaagtccctaacaaacctcctatagaaactggctaacccatgaaagctcctcacttcactcatagtcttaagcgtaggccactcttggatgacactaaccttttccttatccacctgtacccctaacaacaaatcctagaaatacaatatgatcagtgaaaaaggtacatttttcaagattagcgaataatttttcttccctaagcacattcattacaacactcaaatgttcaatatgcagatcaagatcagtgccataaatcagaatatcatcaaaatacaccacaacatactttccccaaaattcccttaagacatggttcatcaacctcataaaagtgcttagacactagttagcctaaaggacatcaccaaccactcatataaaccatacttagttttaaagataattttcattcatcctcttccctcatcctaatttgatggtacccacttttcaagtcaaccttagaaaatatgcaagcaccatgcaactcatccagcaaatcatctaacctggggatagggtgtttatacttgactgtgatgttattgatagcccagcaatcagtgcacatcctccaagttccatccttaggtaccaaaatcactggaatagcacacatgctcatgctctcttgcacccatcctttgcttatcaattcttcaacttgcctttgaatctctttggtctcttggggattacttctatatgcagggcggttgggaaataaagctccatgaatgagatcaatatgatgctcaattccctttaaaggtggcaatccatttggaacctcctttggaaacatatccttatatttctgcaaaagaaattcaacactagcataggtagcaattttatttgggttatcagcaacaaaaatattgtttttgtagtacaacaagtaaagtggtttctcagcgaaaaacatccttctcacctcactctcttttgctaaacaactcatttttctctcaagtgtttcactccttcccacaagtgtatcactcttcttctttctgttttttttgtgtgtttcactcttctctcgtttctcttgcactctctttcctctcaattttatttggtccccacacacctctccaggagataacagtttaagaataattttctgctcattgtgcctaaaagaaattttttttgtgaatccatcatgtattgctttggtgccatacttccatggccttcctaaaaggatatggcttgcctctattggatccacatcacacaacaccctatcattgtatcttccaattgaaaggcacatctcaacttgttggctcaccatcatctccatcttcactaagccattgaagtttgtatggccaaggatttggcttagtcttcaagtttaatttggacaccaatctggaattggccacattagtgcagctactaccatcaactatcaaagagcacaacttcccattgattgaacacctggtgtaaaaaatattttctctttgagactgctttaggggttgcatctggcttccaagcaacctcctgacaattagtaaaccaccctttaatgtttcctcttccatctctttgtctttttctccttcacttgttgaagattcactggtgatttccccatcttcattcacgagcattgtccttctggttggacatttagatgcaatgtgtcctttacccaagcatttgaaacatttgatgtatctggccagtgcttgaagatgatgtattaggcttcattagtgatttcccatgtggagaagtcactgttggaccagttgaagatcccccctccctcttgggtctgtccctccagttcggatagtgagaactggaagaattcctccttgcagctcccttcctcttgagttgttgttcaacctacaccgccttatacaatagatcttctaactcgatatattcttgcaactccatgacatctctaatatcatggtttattacattcaaaaaaaccaaccattgttgcctcattatatacatctatgttggctctaatcagtgcccttttcatctccttgtagtactcttcaacacttatattgccttgggacaacttctggagtttcaaacacacagtcctgctatagctggttaacacatatctccttctcataactctcctcattttagcccaactatcaacctctggttcctcatctctcagtctttccctctgatatttattccaccagatgagggcatagtcaaagaattcagctactgccagtttgaccttttgttccttggtatagtcatggcaagaaaacatgtgttcaatcttcagttctcactccagatatgcgtttggatcactcctacctttaaatgggggaacagttagtctgactccttcaactttattatgtctcggtcctccttctttatttcctctccctctcctggcctgccacctcttatcgacattagaacatccaccatcatgattcaatttattttctattccttcaatcctgccatagagctcctcattattttgtctcatcatcctttgtatttgtttagtcatagcatcaagtaacaacctctgagatccatccagatgaggagggccatcaccacttgctccagccatatttctaaaagcaaatagaatttatcaaggttaatagaaattatcctcaccactttgctcatgtgtttacactcgatcggatggttgcactcgtgtttctgcactcaatatggcttttaaaacatatgtattgcactctttccttttatagattggatgcatcaagacaatccaccagacccacagttggtaatgaagcacaaaggaaaaccaaaaaaaaaaaggctaattgaacatataaacttcaaatggccataacttttgattagaatgtccgactaaggcctataatatatcaaaatgcttgaaattgaacaaggaagccttggtcaaattccaaaggggatttgctcaaatatttttgccaaaacacgcctctaactaggtgaaaattagcacttaagattcactcacccaaatttttttttattttgatttgacattataaaattagaacactgaaatagaagcttttttttataatatacccaaaacacaaaaatatatagacaagagacaaaagaacgcaggaacagaatcgggaaaacaaaaaacagttgactaggaagatcaaatagaaataggtcgaacaaagaaaacagaacaacgaaaaaagaaaacaaaaacaaaataaaaaggtaaacaaacagaaaggatggatagaacttgtatcaagagtcaaaactctgatactagaaaggcagtggaagtggcgcctttcatctatcattaagtggtccataaccagaattgtattggacccctttcccttaatcagcaatcccacacaaagtcgttgcttccctcagtcacgcgatgtactttgctcagtcatgcgacacacttccctcaatcaccctctaagcgcaacaccaacaaaggtaagtgagtattcggcttttggtatcttgtggtgtgtgtgtgtgtgtgtgtgtgtgtgtgtgtgtgtgtttggcttttgcagagcaggagtgactccagcggaacacatttggagattttcaagtgtattatgtaatacttatttcgtaatacacttataaacccaaaagtgtgctatagaacacctattccgtaatacataacttttgatttttggcttatggaataggtattctagaacatatttggagattttcaagtctattatggaatattcattctataatacaaaatgaggtatgggatgtatttagcaaaaatgagggtgtgaatagcaattgcatacatgatatcatagttataaaaatcggtccagtcattgacctggttaaggtaatgggttactaggtcagtggtccaatcgatgggccagtaattgactcagtttgacccggtctatattaaaaaattcaacattatatatgtatataactaacattatttgattaagaaaaatttatccataattctatactgaaaaatccaaaataaaaattgacatattaaattgataacacaaataaagtgtattaataataaaaaagactgtaaatagcaactatctaaattaaaacacaaaagcccatttcaaaatctaatatggaaactacagaaagaaataaaatgggtgcagaaagtaaattaggcccaaataagcagaaaaaccctactgtatattctttttttctccttctttattcttcttttctccttctttccagttcttgtcgtgctgcattgttgtgcttttgtgttgttgaatgctgatttctacaccacacaccttacctcacctcacaaactagttactgcttcttcccatttcctccgccaccaccaccaccaccatcgatggcggcgacaacccgcactgccaccctcccctctcctctgcccgcactaccacacccacttcctcgagccattattctgagttttataaaactcagtcctggttcctaaactcgtcggggtcaccagattcttcaaaaaccagctagttcttgtcgggcctaactgggtcacttgcatggtcggctccacacccaacccagcctggagctaccaacggttcccggtcggaccaatccgaccggccgatccgaacctgttttaataacactgcatgatatattcaaaataaaccatccctttttacatcttaactacccattataccatttttccttaaaggagtactcctcttggaactcctttttttctaaaaatgtatttttggaataacatatatacctattctagaaatgtattccggaactatgatgcatagttttcaaaatacatttctagaatagatatgttattttagaaagacattactgattacatcccatgtttgttagtcttatgttcatcctatcattagtgttcggcaaaggaaccaatataatatttttttaataaatatttacgaataaggggctgtttcacatatatttacaaataaggggctgtccaggcatgttacagcaaccccaattctataaataaggcccccctaccccagttccttcatatattggcttccagtgttctctgcctctgctaaactgccatcattctggtgttttttcatttttttatagatttttgaaggtgttgtgagtgacgagaaacatgagttcaagtggtaattctgttcgcgttgtcttatattggaatggaagaaaatatcaaggccaacattgtgtcatttttgaaggggaaacatgaggaacctctgtgcgacgtacgtcaaccctgagtgaattgcatgaaaagatacggcaaaaattgcgtctgaatatcaaccagtcaatcactttactgactggaatattatggcaacatgaaaagttcatggggtttcaaataatggatgatgaagacgtggagttggtactagaagaattttgcaaccaaggaaggaaagattttttggagttgtacatggatattacagaagttgaggatgttgctttacccatccaggcagttccacatcgtacatcatcatatgctgctggagggccatcgtatgctgctggaggtgcatcgtatgctgctggaggggcaccatttgttggcggagaggtaaacgtgtctcaagaggattcacatgacccaacttgggtcatggatgaggatgaagaggatgacgatgatgaaaatatcgcaatggaagatcggcttcttgaggaggatgctagtgcgtcggatgaggatgaggatgctggtgtgcatcaggaagatgttaatgtcgggccatctgaaactcgtcatcatgcggagggtggttcaagtcaaccagaacaaggtaaattagctaacgatgtgaattagaatgttttgtcatttaatttgttttatattgtttactaatatgttttttaatgtccattaaatgatgttattttgttagattaaataagtgtatcctgtttaaccgaaagtgtgcagggtttagatggtttggttggggtttagtgcgttgtgttgggtttagggtttggttggggtttatgggttgttgttgaggtttagggtttgattgggtttagggtttgggtatttgggtgacgggttagggttgtctagttgtttttagctgatatcgttacttaaactgacgttcaatatgcagctgctgaggcgattcctttctggcaaggaattcctcattatacatatattgattggagttacccacccgaacaagactcttttagcggttctggttctggttctggttcgggttcaggatcagtgcagagtccgtggcaactaggggatgatttgtttgtgaaacaagaatttgactcaaaaaaggaagcacaattagcagtgaagcataacttgatgaaggagcatcaagaagtaattgtggttgagagcaagcctgacaagttttccatgaagtgtgttgcgcatactgatggttgctcttggagggttagggttattaaaccagtttttcgtgagaagtgggttgtttcaaaatggggtggaaaacacaattgcttgaatgatcatatttcacagggtcacagatagcttgatgctgacgtaaatgcttcactggttgttggtatgttttaatttactgtgatgcatttcgaagacatatttgttttcaaagcatgttgttgatgtgattgttaaattttttttttaggaatgattaaagaggaaccatcagtgtcaatctcattggttcaggagaggattaccaacacattcggatttaaagtttcttatcgaaaggcttggtatgcgaagcagaaagcaatggcaatggttatggggactaggtagaatcttatgcattcttgcccaggtggtgtaactacatgtttcgttttgctccaagttcttattttgatattcagacgaatgattacttcgttgcaaatcgactggtacgagcaaagcgcatgtttcatcgcattttttggacatttggacagtgttgtgaggcatttaaccattgcaaacccatcattcaagttgatgggactcatttatatggaaagtataaaggaaaattgttggttgccacaactcgggatgggaataatgaatgtgttcctttggcatttgccgttgttgagggggagacgctggaagcttggaattacttcctttctaacattcgcttccaagttactcgcatgcaaaatatatgcctcgtttcggatcgccaccggagcatcatatctgctgttcaaagtcatcctggttggaaaccaccttttgcgcatcatgtgttttgcctgcaccccattgtcagtaattttaatcaaagattcaaggatgcaagactgaagaaggccctcatgaatttaggtgagtcaaaaccttgaaattgatcatacttttggtttagaaaactttgtaaacagaattatgttgattttgttttatatgatgttgcaggttatacaccctctacggtcgactttgacatcgcatttgcgcgatttcgcgagacgagtccagaggttgcggaattgatcgattccatccccaaggagaaatggacacgtgcatacgatgtagagcggagaagatacggccacatgacaacaaatatggctgaatcagtgaacagggtgctgaagggaactaggaacatgcctatcacggctcttgtgaaacacacgtacacccgaatggttcagtatttcgtagacagaggtgaggcggccaccgaacagcttcagcattcacaacaatattgcaaaaatgtggttgaagcaatgaggcgtaatcagtcattggcttcaaggcaccatgtacgcagatataagttgctcgaacattatttcaggtggatgatgggtgcgagaagtcatattcagtgtcccttgtcgatcgggtttgtcagtgtgggaagttcaagcctttcaaaaacccatgcagtcatgccgcagctgctgctttacatgtgcgccaaaatcctttttagtacgtggacgacgtcttccttgtaagcaagttggtgcaggcatattcagtgccgtggcagccaataggtaatgaacgggccattccaccggccgaaggtccagtcatcatacctgacaactcgatgctgcgagccaaaggtcgtcccaggtccactagaatacgtaacgagatggacgaagttgaaacatcccagagacgtatgaggtgtggcatttgtaagcaagttgggcacaaccggagagtttgtcctagctgtgggggacttcatgattttttgagtggttgtatgtattttttttactagtgtttgataatgtacaacgttatttgatatgttatattagttttgtattaactttttctttataacgttttaatagtaatcatgtttgattttttggttttctgataatgtatgcatttgatgtaacaatatgttgattacatgcagtcaaagaatgtctgacatcgtacgcacaacttgggcgtcgttgaagacgcctaagttgggcgtcattcaacacgcccaacttgggcgtgactgaacacacccaacaaatacgcgtcattcaattggcctagcttgggcgtgactgaacacgcccaagttgggcgccattgagccctatataactcgcatgctcggcactcaaaattcaatgtgcatacgatggctatcttaggagaaaccagcagtcagaacattggtaattcaaaattagcgttcatttatctgaatggatcaacgaagcacgacgaaacaggggtttctttcctatgtgcaactccaattcctatgcgagttcctgatgactgttcgtttcaaaccctgaagagtaggatgcagcaaaccctaattcttcctgatgaccatgttgttgacaacatctactatcgacaaccgtctctgcatgcaggtcagcactatttttttacttctatggcactcacaaatgatgatgatgtttgcagaatgttaaggtgcagtgacaatatgtcgagtgctgggccaattgaaattttatgtgccatccacagaacacccgatggcatactcaacctacttcaatccacaatcgttccaacacatgatgcaatgctatattacaacggaaagtggaacataccccgaagagccggttgtgtgggttatgcctttactggaacaaatccaatacgatttcaaattccttctgcatgcaccatggaaagactgaaggctgtcatcaaggaagttgcgccggttggatttccccctgatgggattcacatgtcatagtttgtgagaaaattgttttttcaacagccacgccatgcacaatattcgaccaccacaatcgaatatcagataaaagagttgacaagcgacgaagacgtgttgaagatcatagcagaatcgaactactggagacgttttggtccaattgaaattttagccatttttagcaaaccggacatgcagatggaatgagaaatgtgcactgaatatgttgttttacattattgttcttattacaaatgaacattatgtttagggtttatcgattcctgtttagggtttaagcctgatagtgtgattagggttaacgtcttcggttatagacttatgggtaagcctttacataaacttcactaatattgagtaattagttttcccattcaagttttgccttggcaagcacttccttagctgcaattttctttgcttgtctctcttcactttgcttccctgccacttccttgccaaacgcctgtgatgatgacagatacaatcaacctgaataatactaaatcgggctgaggtgtggggtgtttcaagctttgtgttgaattcgtgcattccacaacaattataaggtaactaatacttacactgaaaaataaataacacaaacaaatgtaacatacataatagttacaatacacatcattaaaataaatggtacaaacgaatggtacaagcaagcgactaaaactaagacggtggtggccactgttgccgacgcgcttgtctatcaggttgcctccgtcttcgaggtcgctgtgaactgcttgcctcgacggggtctggctgagacaggcctggatgataaggatctggccgatacgtgtctgcctcgaaaaatcctgtctcatatgatgggacatacagagctggacatggagtgccctgctctgcatatacgggcatagcatgctcagcagattggggaacatatggtgcatctgatgcccaactcccacagcctatagtgctcatatcaaaatccatgagcatctgttccacattcgtatgcatccaatcagcgggcacatccccaaagccgacatctgcaccgtatgcgtccgccggtgtaggcacatccgcagaatagtaggaggtactatgctcagtaggatcatgatagaacacctgactcccatatgtcgacgacacatctggaggcctataagaaccaggagcggcaggcccgggaccaacaatgggctcaggcacctgctgaataggtctccatcgacgctccagaccacgtccctcccttctgcgacgaccaacttgaagagacaattgtggctcctcctcaagctgcgtctctggagcttctggtccagactccaccacatgacaactttgtctgaagacagacattaagtgacccaactcctgatgcgcccaatcaaagtcgaacgtcgccctattctgcctatgtgtggcgaagtagagcatctctatcccatcgacctataaattcaaattcaaatatataaacatcactgtcaactatgtcaattatgataattaatgtaaataaaaaaaatattaatgaaaacaaaacttacactacgacccatcttcgcaccctcctttgtgataaaccgcttcccattttctctgtaccataccatgtactcatggtttggtgacatttggccctggattgggggggaggtcgatgtgctgctccctttgccgccagcgattcagaaacggtctgagcttacgcacccagttttcttctcgttttccacgaagtgaaaagtagtgcacacccttcagcttcatggcaggacgtgggattggccgatccctcctaaattgccacatgcatctatcgggctgggcagcttcaactgtgtggaaacatataataggcgtagatgtcatccacaacaatcactcatggtcagatgcaccaacgaaatggtaatctccatatggttcccagaccacctgcataaaaaaaatttaggttgttttatgttatgacataaaccacaaatgcaaacatgcaattactaaactatcactatacatacgtcgtcccgactgagggattcaaaggcagtcctgtagtacaccaactcgtgcgggctaagccggggtaggcgttaaacctgttaacaaaacaactaacattaaacaatgtacggcttaattgtttaagttgttataaaatgaacatgtagtcacacataccggtggccaaaatgcgctcgtgggtcactaggctgcggaatacatggagtaattggtggaaatctcagccacgcccacgcctgaagcaacatatggcatccaccaatgtcctttctggatgcatctgtacactcgcacatctgtctaaacaaatgtgcaaggaccgcagaggcccaactgtatcctctgatctctgggaaatccccagccaaaaaagggatatagcgtgctgccatcacgctacctccagatcgatcgctcagcagccatgcaccaataaggcgggcaatgtgcgcctttgcaaaccgcgttacattgacaaaatctttatccaactcaccccaatccccaaaatgcctatcgaagtaagtcagtcgtaggtatccaccggtcagctctgtttcggcgtcaggttcttgaccgaaaacgtcctcaatcacctccgcccaatcggacaaagtcactccagtgacgacattgccagccgtgggcaatcccaaaataccagccacatcttgtaacgtgatagtcatctcgccatgtggcatgtggaacgtatgggtctctagcctccatcgctcaaccagagcactaatcagggcagcatcaatctaaaataatatcattaatcaattgacaactatagttattgttaaatcaaatttgattattaatatgacgtgttgcatacctgaatatgtcgcatgcgtgcgacatgaagaaagccagcgtcccacagcatatcaaaaacgacttgaggaatgtcgtcatatgctggtccccccgacgccttgccacgtcgagtctttagtagtcgtactgtgccctcgttccacatagattgtgaaacatgggtgcgttgagtacgcctacgcaaagcgtcccatctgtacggggtaggaaccacataagatgtcagatccatcgactcagcctcatgatcggatacagagcgcgatgaatcagatccagataaatcggccatgttatcagtaacttcatacaccaaaaataaaaatccatgttaacaattatgtaaaattcacaaatcattaaaacaacaaatttctaaacactagaccccattcggcctacaaccataaaccctaatgaccgcaccccgaaccctgaaccaaaccctaatccatgcaaccaaaaccatgacaccaaccctaaactcaaccctggactaaacgtcacatacctggccaaccaaacactaaaccctaaaccctaaaccctaaaccatacaaggccaaccaaaccataaaccctaaatcgcacaccatcgtcacatgaccatgaaacccaaccctaccccaaccctaatccaaacgtcaagtaaccatgcccaccaaaccctaaaccattaaccacaatcgaatatcacatcatcaaaccataaacactacctaaccatgcccagtaaaccctaaattttaaattctaatcattttagccaaacagtacagtaccaaacacctaaagaattttctatccacctaaatttatgtcactaacaaattaacatcatcctaacatttttctaataaataaatcttaaagcctaaactaaaacaattatcaagtaacctaacatctattgtgctaaaaaataagtacattcatcattaacaatataaataactaattaataacaacatcactaaaaggcagagcagagcacttacttgttcgcaagaatttttctgaacaacttcgcaattcagcagagcttcgctgcacagaatatccaccgaaaactctagagagaaggcagagcacttctagagagatagtggaaagtgaggacatggtggggagggccttatttatagaaatggggttgctgtaacatgcctggattaggcatgttacaacacgcccaatctaggcgtgttgtaacatgcctaatccaggcatgttacaacaagcccaatctaggcgtgttgtaacatgcctaatccaggcatgttacacagccccatttctataaatatttgtgaaacagcccttatcggtaaatattttgtaaaaaaacaccattttggttcttttgccttagtgttctttaaatcctatctaaaatcttatttgcatactacttttttatgccccgctccttcattttaaaattccaacccttcttttatctcgatcatcatcctctaccccacttacccatctcaagacctcaaacttattttattgacacctttcttttgcctcactcccacatttcaaaacttcaacccatcatttttttgtcaccttcttctacctgactccaccctctcaaaaccccaaactcttattttcctggctaccttcctttgctatttcctcatctcaaaactctaatccctcatttttttttgtctcccccccacccatctatcacgtccatctatgtcctcttcaaagatctcaaaactctaaaattctttttctgcattcaactctgattggtaactcatatgcattcatattcattggatcatcaggttatttctctccataatctttggttgtaaattcattttgtattatttgttatttgatgctattgtaaaaggggttctttgaagcttgttctagagtagtgttctctagggaagaacagaggagtgttctctggttcttgctcactagaagtctaataggattttagatttctattctttatctagtgttgataaagagagtttgttgtaaagcttgtaagaataggaatttataatagtggaactctaatctagtgttgattagaagaaactggatgtagcttcttttgagaagtgaaacagtattaaattcttgtgttgcttttctattccttcatctttatcagttatcttagtgattttgttcttggcatcattatcattactcaacaagttctgttttgagctattggtttcttgggttgagtgatttgattgattaaaagtattcttggtttaaaagtgatgaagatcctttaactctaattttataaacaaattttttttaaatatcaagatcaaaccaattcacccccctcttggttattgtgggtattcctattgttttcattaacaatgatggggatgcaatgaaatgcagactcacttcatggagattttaaccatcgagcaatcatcataggcctattacctttacatagaataaacatccatttgttcaatgaatcccttgattgatcttattgaagaattgaggttttatcataaataaatggccatgggtaattaccacaacaaggcttgcaacggccttaacatctattggagttcacttgctcatatattctatatgctcatttggtgttagtcactacgaattcatccaacacttagttgaaggtccctcctaacaccctcaacttacatgcttactcatatgcaacaatctatgaatgtacatataatcattatttttagacaatttagtcaacaacatttttcaacataccaacacctcataagatagacatccacatatgagaattgacattttaggcccatcatgcaacctttaacaaatattagtctcaatcgttgacccccttatacatgtaaacatatatcaacaactcatagacacattatcatgttcaattataaaaattaaaattatttaaaatatcaaaatgggaggtgttgtaggggaaatttcaccaaatggatcatagattcgctcaacaaaattaagccagtagcaacctaactttcaaaggtagattcgaccaacaaaattgaagttcgctaaaggattttaaaattagccaaatgaatttttaatttagccaaacaaattttaaattttcaaaattcacacaacaaattcaattttagaccaagcaactcatgacggagagaaaccttgttttctgtttcaattcgtccaacgaacacaaaaatctgcccaatgaatttgtgatagaaagcaactttgctctatgctgaaaatcttcttagcaaatccaaaaatctgcccaacaaattttgcaaaactagtatgtgaaccagttcatccacttttattaattttcatttttcaaatcaaagtagattcatttaatgtctttaaacagttttcaacatcaaaaatacattcacaacatcaacttcattccaaaaattataactttacttcatcaattaccacacactcaaaatcacacattcaagctcaaaacctcaaaactcatcaagaagatcatttcatgaatcaaacacaattcattatcaattctataaaaacataaaataccaagtgagcaccccttaccactacaaaaaaaaaaaaaaaacaagttagcgaggggctattctcttgataatcccacgctaatggtatttgcaagggatttgcaagggaatagttattcgctaaattcaagtcgctaatctgcgatgaagaaaatcactttaccttttgtcactaaaccctggaaattccctcactaatctactgcttgatatccctcattaatccatcataaaagacattgtgtaatattccctcggtgatctcttgcaattatcccatgtcaatccctagctaatccctagtaattgtccctctctagttcctcgataatccctagctaatctcctgtaattgtccgtatagtcccttgataatccctagctaatctcccgtaattgtccctgtaacaccccgaacgtctccggtatgttatcatcaatgatatccatatcacgctatcagcgttaaaaacatgtggtgcagaagcgatagaatcgttttttttattacattatgcatggaatataaaaaccacataataaagcacataaaacaagcccctgctgatccagataaaacatagacaactatataggcagatacataaaaccaaacaaagaaagtcaggaggaaacatattctatacaacataatcatctgtacatatacatgcttaaaaacaagaccacagttgggtcatacatcataaaatgtacagggaatgggtatacatctaccctacaactacacagagatctaagaccagctccaactcttgaagctctactctggtcttctattgcaacctcccatccagcctatcaggtccactagggcctcctgccctgaggtcgctcctttcctcaagaagtacctgaaaaccacaaaccccacatagggtgagacaaatgtctcagtaaactcagggttttgggaaatcctccctaaccctggttcatcaccaaacatgaacaaaacatataaacagagctaaggatatcatccttgctcacacatacgaaacctaggatatcattctagtttccacacatcccagccatctgggtccatcacaggatgccctcagcatcagaggtattccacctcgtcatggctctcacagccatccataactggatgctctaagcatcagaggtattccacctcgtcatggctctcacagccatccatcagagatcaaagtcatcaccatggcatcagtatctcatcctggctctcatagcctgtctcaaagatatctcacagaggtatctatcataagtgtcatcccctggacacttctcaacacaagagaggcaccgcctctgaaccacacaaacattgtctgaatccaccattcaggacttcacatactttgcctgaggagctcctcaactcaggacttcacaaatactggcctgggaatagccctccaggactttcagaaacactggcctgggaatagccctccaggactttcataatcactgcctgggaatagccgtccaggacttcataaacactgcctgggaatagtcgtccaggacttcaacatacactggcctgaggataatcactcaggacttccaacatttttgcctaaggaggaacatccacacagttccatctgtccttaggacttaggtggagagcagtggcacctcccaaggaatctcagctattccagggagtcctcaaactctacctctggctagggaacctcaactagcctgatactcatccagtatcttctaggttccatcacagaccatctcatgatctgcattccctcaaaagcccacggcctcacacctgccctatcaggtgtctcataaccctcacactgtctcagtgtctatcctagggttcatcattacagcccagcacacactaggtcatcacatattccaaatatccagaacggtctgagattcactcaaagcaccattcatcagcctctcaggctcagaacatatgcacacacatatatacatatacatacatcacccattcgggtggcaaaccagaataagggggaaaaccccagaacaatgagcttacctggctagccgtgcctcacagctctaacctccactgatggtctgcttctctgacacccactgtgtcaagccctaccaaggcatacaaacacatatcacagaccattcaagcatataatcatgcataagctcatcaagcagtcctcaactgcccttgggaaggaaccacaatcctttccctcaacccgagtcatctactctagggttcatcaggctcatcctctacaagccttccatagaccctcagtggtctatctcagatccatccatggcctcagagtcattccagactcaaaccaagccatcatcagtgagctcaaaagctctaaaaacccaagtcctctgggtttctcagggcttgaacggttcacatcacaggacaccattaccatggccttctcaggcacgacaagcccatctgtaaggctctagcatgtctcatatcaagtgactcagtccaagtcacacatgccctctcctagagccaaaaccaacagtcaccaaaacacaaactgaaagctaatccttcctcctcacatcattctaaacacttctcccaactggacccagagctaattctagccctatcacagatgggtcactattcacaggaaaccccccaaatccaaatcaaacggagaaacttgagtttcttacctcagaactgctgaggaagacctctgggatgctctcccgagccctggtgccgctgggccaccgctgttcctcgccaaactcgagctttcatccacctctctggaggttcctcagaatatggaggttttggtgaaatggaggaaggattctcgctctctcttggtttctaggaggattaaagggttcaggaagcgtttagggtcatcaggcaaggtcatgggagcttgggaagctctcccatggctgctggaggcttggaggaagaagaaatggtttttctctcctcccaaaacgcgatcccctttaaaaataatctgcaccgacctttccgcgcagatcacgcaggatgccgcgccatccgcgccagctgcagaaactgtggcgccatcagtgccaccctggcgctcccagcgccagcttccagagaccctggcgccctcagcgccaatcctgcgccatcagcgccagaaactcgagacattggcgctaccagcgtcatcctggcgcccttggtgccacattccagagtgcatggtgctgtccgcgccagacctcagacatagttttcctgttcttcttctagcgctaaccgcgccacacatggcgccaaccgcgccagtcttgagggtccttacagtccctctctagtcccttgataattcctcgtaatgcatagcctaatttcacctatctaatcctttgttagtctctcgcaatttatattctaatttccctatctatttttttaaaatcattttttcttaaaaattttctaaaattatacttgtgtattaaaaaaatagtttgcaattaaagtttatatttaaataaattttcagcaaataacatgatatgtatcaaatcttacatcaaccaaataaaacataattataggacgataggtctagtagtctaaaacttaggttcttagggagaaaaaagaaaggtagacactttgaggcaaaggagtgagccttgccttaatccaccaacaactcaaactacaaagcactaggaagatgaagtagagaaagaactaaaattactcactataatggtctccaaagcctatggggagaggatgaacaatcttttgtgaaagggagcaagaacctcacttggagaggatggttttcttatttttgttgttataggaaaatgaaggattttggggattttggggattttccatagcattttactaatcgtactccttctccacaactctcctcaaggtgcaatgtaatgcctggtatttgtaagcacgtaattaagcctgggttaagcctatgattaaggataatcattttggcttaggcgtttcagaggaaaggcttggaaaagagggaaataggcagctttctgccatatggcgcgacccacttggggtgtcgcgcgacgcgcgccatatgactagaataggctaagtggttctgccacctcacgcgacatacgtgaagttggcgcgagtcgcgtgacctggcagaaaggatggcgcgagtcacgtggataggtggcgcgagtcgcgtgggatcggcggaaatgttttataaataggctcatagggctgagaaagaaagaagaaaagaaagagagaagagagaaaccgccattgccgcgccttgagagcttcatatcttctccatatctcatctaaacacctccaacccaactggaaaagtgatcagaaccccgagaggagtgaaaacccccgattgattcttgagaaaagctgagaaatagtgagatcagatttctcagagagaaccccggagagcttgagacccagaggcgaaggaggcccagatcgagcgagtggtctgagggaaagtggttccctggtgcttctgagcatcacagaggtaagaaactcgagctctaaccgttggttctgtgttttggattttggggttttggggttatcttgaggggtgtttttggaggtgttagagccgttattaggctcggactctgttgagtcttatgctcagaggactgttctgaggagtttagagccttgaatcatcattattgatgaagtttgattttggctctgaggcagtctgagcagaggtaaaaggtcgactatttgactagtctggaccttagagcagttaacaaagttgctcaggggaagatatagatgagtttgaccggtggaaactggtgattatgagaagttgggttttggctattgtgagcagagacatgctctatgttagcctgatcagagtcttgtggagactctgtagcctttataggttaagagttgatgttgtctgatgagctgatgttgtgatgtgcctgaatggtctgtgatatatgtgtgtttgccttgttagggcttgacacgaggtgtcagaggagcagaccattgttcagaggttgaaagagcaggctcggcttgccaggtaagctcatctttctgggggtttttccctatctctcgtttatcacccaagtgaggtgattgtagcatgccatgcttgtttatatatattcatatatgattgtgcatgctgaggagataaaggccttgatggccagatattgatgattgaatggttgatggcctagtgtgtgctgggctgagatggtaacctcaggatagacaccgagatggtgtaaggacgtgtgttacctgtggtagcaggtatggccttgggccaggatagatgaacaccgtgttgtgttcccggacctgatgtggtacagatccgaataagatctgtgaaggaatctatagaataccgcgatggtatcaggctagacaaggttccctagccagtggtagagtttgaggactccctggaatagctgaggttccatgggaggtgccactgctctccgttaaagacctaaggacgagtgatttccttaggcagaaatgattgaagtcctgagatgagtgattcctcaggcattggttttgagattctaggagatagagttcctccttcgggagacggtctctcctagatagtgggttttgcggttctaggagatagagttcctccttcgggagacggtctctcctagatagctggttttgcggttctaggagatagagttcctccttcgggagacggtctctcctagatagtgggaaatcctgagggatagagtgcctcctttgtgagatgatctctctcaggtggtggtgtgacgggctgagggatgagtgcctccgtcgtgggatgatctctctcagaccttgatgaggagtcctgagggatagagtgcctcctttgtgggatgatctctctcaggcagtagagctgtaagacctggaagatgagtgcctcctttgtgggatgatctctttcaggcatgtaattatgataatgacgtcctgacatgagatgtttcctgtggtatagaggtagcctccttagtgagatgttcctatactcacagatgtagcctcctcaggcaagttgtattgatgagacatgagttgtagctcatgatagaggttggaccaatatataggagacctccagacgtggttgtacctatatatcttcggaagcgcctctgatacctcctgccatgagatggtctaggatatatacctagatgatagcctccgcaggatggtgatgatgaatagtgacgtcctgccatgagatggcctagtatgtctaggtgatagcctccgcaggatgaagataagggatagatggtaatgaccatcggaatcacatagataatgatatgtgaggaatggcggtatgccatgagagtaacctgattgtagtcaggtagatgcacggtgatggtgcatgaattgagaggtaacgcctctctagtatgagcagtgttcagttatgaacacttatgtgatagtacctctgagagatctctgtgagacggactctgagagtctatatgagatgttggtgccatggttatggccttaagctctatgagatttatggaagagccagtatagcgtgttatgccatgatgatggcgtgactctatgagttgagttgagatggcttgagagccagtatgaggtgtgagacctctgatattgatggatctagtgtgatgatccagaggaagagctgagatatgtgttaaaactaggctaaggtcctagatgtagtatgtatgagctggggtgataccttaagctctgttatgtgtatgtgtatgcttggggttaaaccagggaaagggaggatatcccagatccctgagcttactgagatgtttatctcacccctttgtgggctgtggttttcaggtacttccggagacgagaagcgaccacagagcaggagactagctgagtatgctggagagggtcatgggctgcagatggagtttagaatagttttatttcatatctctgtcttgaatttgtataagtaaagggtgtgagtatacccgttgtatatactgtttatgtttcctcctgactatctatgtatagttgttatgtatctgcctatgttgtgtatgttgagtatctggatcagtagtggcttatgttgaggtttttatgtgggttttataattcatgcatattgatatcaagaaaaacgattctatagcttccgcactgcgttcagagaacgctgataacgcgtttatgatacttttaggataacgcaccgggtgcacacggggtgttacagtaatgaccctgattagtaaattggggcgttacatgcaacacaaatgcatacttaacccaacactcacataggcaacataagatattcacttaattcatatttttttaacgacattaaataaatttaattcctctcataatttaattcaaatcacttaatcacacatcaagaaaattatggtgttagaataaggattactaataaacatttatacttttgcttaattgatttatttattagatttatagtttatttcatgtatattgcatattcaatattttaaaaattattatatttgtattgagtgtataacatatagggttgaaataatagtgtaaagttttgctatgtccatatgtggggaacaatctatttaataggagagttcgtgtttgcttctctaagtgtgaaagaatttcttagaccactgacaatcacatatcatgagcatgattaatctctgaatttgtattcatatatatatatatatagaaagagagagagagagagagagagagttcacattaatcactggtctagtgcaattggccttggattggttaatgtgcttagaaaaatgttgagttgttttcaatttcgcttggaaagggaccaagcaattacaaagggggaaaaaaagaaaaattgaggttaccaatggttgtctagattcttgtgttgacaagtaagaaacccacatctgtttaggcaaatctggcttgataataagttgcaacgacaaagaagaggcttaaaaataaggtcaaaagtaaagtcagggtgggaacaacttagggttgggggaccaaagcctccacttagccttcatatttttttacttgtgaccaaacatttgcaagcataggatcaatggacgggtaccctccaccaccatcaaacctaaaaaatttcttcccattttcctatgattgtcctcacatgcatcccaagttcccacaccacaatgcttatttaatcggtggctttgaaaataaaggcatccaactaacataaattatatcaaattgcccctcctcctcatgttccctaataaatataagtttatagtactcatccccacgttagcaattaaataaagatgaatatagagaagggaatcactcaagatcaatttgctaaaaagcattgttgttaatttgtttttataataaatagagtttaattagctttcactataaatttaagggtttaattattgagtgtcttaaaagatactagttgaagaatcaataagtaaaaagattttactaaaaatacactcaatatagtaaaatacaatttgcaattgagtatattatattttattaaaatattaaaaactttactcctattcaatcaatatctttctttcatttcatttaattaaatataaaaacaaaataaataaataaactgatattgccttaacttcttttgaatgacagatgatttaaaatgaaacaaaattccgaaagcgatagatatattaagacaaaagatatcttaagcatttttttaaaaaattcatgttccaatgtaaagtaattaatagattatattttttattttaggaaaaaaaaaaatagaaggaggaacgcagaccattttaattacggctatggtatgacataaaatttaagcaaaacttggtaacagaattacaagcaatctagcaataataaactaacatgatgaaatccaagaaatttttcttcttggcatttttcgattctatcaattaagctgatgctgattaattgattgaataaatagtagatatgatagctaggattagttaaaaagattgcattcacacgttataaaatgaaattggaataaatattagtttaactcgaatgaaatctattgtttgtgcaggccaagggtagccaaaggaacaccaactaaaccatgttggtttccacatggtgctgcatataaaaccccaccaatcatagtactgtctctttctctcacatacgcacacctgcaaccaaagtgcaatattattgcacagtaattaaactagagtttaaagcttcgttgtctttagtctgtggtgacgtttataaagttgaaataaaaagcattcctgatttgaagggtggtggaggggatgggagaatcagtaagcatgtcccttagaaagaataaaaaacctatagagcgcggcaactatatgaaaacctatcaaaatcatcattgccaaggagctccaatttatcacattattctctaaacaatttgttaatttaatcctttttagttgattctttttatattattattctaaaaaattttagtctagagtcaattcaattccaaaaattatttcaaagtaaaaattatttcccacttctatcttctgacttgtccatatcattattatatatataatctttaacatatctctatttatatattgaaaattagacatcttaaatgtaaagttaaatatctacagaaaatctagtagtgatctgataaagatggttcaataagttaaataattcttaagatagactctacatcactaagaaagtttaacttaattagttgaaaaaaatatataaatattataaattttttatattgtgtttaattcctataccattataaaatttaaatttagatttaaattaactctaaaaattaactcatgaaataaattttatttttcatttatatactttattttagatatgttattactagatctccaaccattattattaatataacgaaattattgtattttaactttggactttggaccaacttttcttaaaagtgaaaaggtttgcgaagtgaaaaaataataacttatctactgtaaaatatctcattaatgtaacccacttcaactaatgaaaaatgagtcattactttttcattttataaagcttttcactttaaaagagtaaaatcggtctcagatgataattgatcttataaagggtaataattatttcttttagttaatcgatttattttgttgatgtacatatatagaataattcatgttagatcataccagcgggtgatcaatctgacacattcttttagtttaatcccccacatcttgcaatcgaagtgacgataaccacacataatttttcatttaattagcagttaaaaaaatggaaaggtgtgactcttgcaacaaaccaaaaggcacatggtaaaaaaaacagttctgattggtcactacttcaaagaatagccttatttgattatcattgtaagaaagaaagaaagacatgtgtcaaataataaggttttgcataaactatactactttaggcctaattatgcacaagtacagacgaccacacacataactaaattgtgattggttttgtgccattgtcttggctttgtctatattctctaccgaaaagcttttttgtgataccaatcttggtaaagaatgcttatccaccccactagtgtagtttatatatgcactcttaagctctaagccatgattataaattggaagagcaaattattagaaacattacttggacctattaaaataaacgagataaaaaaggttgctcttcacttcttctttaggaagccaaatgtagaaatcacttcctcgaagctttctttcagtcaagaataatatctccaacaaagtcaaatttcagatttagggaaaggataatatataagctagggagacgtttgtttacaattaattaattcatataaatattcgtaagacatattccgatcatcaacaaatttatcttttaagtaaataaactattttatgatagtctttcaagtaaataatcgaatgagcatataaaaaaaaagtaaataattgaatgcaatcccctttttaaaaaaaaaatcattattgaatgttcgacttatttaacctattaaaaaagaaatcgttttatgaatttcatgaccccacatatatgacaattttatctactaatcatcttgtgaggtttttccatatcatttagatataaaattaatcatttatcatactaataaagttatcctttttcacaagtgattccataatcttgttctaattagacaaattaagttaaattaatcaatattgtaacgacccgtatgcatccggttcattaacattgatttacgataattaagcgcagcaattatcacaaataattaaattggaagcaataaacaaaatggcatcatcaaacgtcattaacaacacccattgtacatcatatatggtgaattcacattatatacaatgtatatatatatatatatatatatatatatcaaaattgtacatatctctctcagagtacaaaatatcaagcataataaaatagattagctaacaagctctcaaaatctatgcctaaggttcacacataacatatccctatgcgggcctcttgccctgggatccaccatctgctccttgagcatcatctgcaaaacatgtaattcccaacaggggtgagataataatctcagtaaactcagggtccttggaggtctttcctcccccctggttcacttccatggcatataatattaaaattggcatcatacacaatccagccatcacggctctcaaaacatatcacatgtatatcataacacagatccaacatatacatatagatatatcatattgcctaagaaagatcatccgcaacgggcacattctcccaggacttactcggacatatatggcacttccgagagaagatcatccgcgattacatatatttatattgaccacatagagttgttccacgtaactctggctctaagggaagttcatatttagtccattctactggccagagaatctcatcaatcacacaacactatcacagtgtacatcatatacatgttttcaataaaaacagtaacacaatttcaatatacatgcatcatgtcatacaataaccatcactccctcagagtatggtggaacacagacaatgggaaacactcccaagaacaaagagcttacctgttctgagtgctacactggctctcctagcctcgtggtcacactcaccagtaatctctgtatcacgccctacataaaggcatatcaaaatcaatcaataacagttctcaaccgttaaagggaacagaaacattattcttttacatataaccctttattactctatctcaagtctctaagaatagtcacttaactggtgactgacagatcttcactaggatctatctcggcctaataaaggtactagagtcgctttaagaccctgcataagttaattcaatgctctaaccagactatatatcaatgattatccaacttgactgaaacagttatttcaacacattttcaccgtttatttagccttctgaacaacttttgtaaagacacttaggctcatattaatcataataccttccatttaatcaacattcttcatactcatacatacttcagagtcaaaatcaaacttcatcaaaagtcatgtttcaaagttcaatattcatcagaacaacttcctgggcatacttttctaaaggacccaagcctaattccaaccctaacacaaaggggtcattattcatcccaagaacaatttcacaaatcaatcggtaaaacttaagtttcttacctctaaacaatcaaggaaggctagaggatcacttctctaagctttagcgtccttgaatcgccttccatcccttccaaaactcaattttgagaaattccctagggaactagatctctctgattgatggttttctctgagatttgatcttggaatctagctcatagaggagttctaatcaactttctagttgggtggaaaatttttagatgaagaatggagtagatatgaagcttcctacttcattaatggcggaaattagcaggataagaagaagaaacactttttggccagaaaattcataaaaatgtccttttataggcccccagcctatgttcccatgctaatagcgccattctggcgctattcgtgccaaattcttgagtctggacgtgttcctagcgctaatcgcgccactctggcgctaaccgcaccagatattcgagaaaaatagcctctaggtgcattctggcgttaatcgcgccaaaaattcgagaaaaaaaatcattctagtgcaatctcacgctaacagcgccacttcccatgctaacggcgccagcaattggccgtcgctaacgctttttgtgacgaaatatagtaaattttaaaaaaaaaaaattccatggttattataaatatcaacatagatgaatttaaattcacagaatcttagttcattgtaaaaacattattatatgacttctaactcaactttaagtttgatcacagtttttgattgacttaatttttatcttttattctcaatttttaaaaattttgatgaattttacctctaacaaattaatttgacatattttaccccccaattttttaaaaaacttgtgaattttattctttatcaatttactccttacacaactcgactttttatccccaatttttattttctttgaaaattataccaacttttttaaatttttggcgattttaccctaactatttattttttgacacattttacctccaacttatgtgtctattaatggataaatgataggggataaaatttactaatttcttataagtttagggtaaaatgcgccaaattaatttattgagggtaaaatttgccccaaaaaaaaagatagagataaaagcgcaagaactaaacataacctcgatggtagaaatgactttttttaatctaccttttatgtgatttgagttagggaaaaaatttaattattaaaaccttttatttttaccaaattaaatattaataaccttttttaatatttatttattaatatttttttaacatgtagttttgttggttgggatactacaagtagttttttttaagtactaattttttaatttaatatgagtgcaaattgaaatattattttgcctaagtaagaattttattagaattaattaaaaaaatgttcaaattgggtatacaatatggtgttttaatatattttaacaagttgaataatgtgtgtgaattattataaatcaattatccgagtttgtttaatacagataaaacaaatatctaaactcatgaaggaaattcaaataaaatacaaaaagattttatatttaatataagactaatcaatatgaataaagaattaatattgataaaagtaatgttatattttacaaactatttctatgaaagttgttataaattttttgttgtcaattaggtctttaattacaatatacacgagtgtgattaacattttaaatgtaataactaaaaagaaactaaattatgggtgtcaagtcgtctttagttcattccgtaaaaacaaattcatgccatgcatattgatcttttcaatttttatgttacgtaaaatatgaacaaataaataaaactttcgacgactttgttagatttcatgttttttttaatttttttcatcaattgattattgttgttattattatcacataattaattcattagtttaaagggtgcaaagtatgaaggcttctttgatcacgaggaagaagaaaccaaatccaattcttttaaattgagagaaaaagacatgataaacagtaacaaaactaacaatagagaaaaggactggaaaaactcagcaagtggcatctatgtgcatattctccaacaacgcttgccatatgatctcagtctcactagcaaaattaggtcaactcttatgagtgaagaatattccgattcaatggcatcttagaatactaggtagactttttctatccttagatcaacgctacccaaattctcatgtgcactcccttgatcaagtatgataatccctccctagagctactttaaaaacattttattatatcctctactctcaacttttattattctcccccttccccaacatttttgtcaacataacttttgtgcatcgttttctactcttttttttcttctaaaatttatatatatcgcattaacacaactactttgtttagcatcaacttcatcaaaatttaaaaaatataagtatgaatgaatattcatacataaacttttaagttaaattttatagttttttagagacctcaaatttcctaagattaaattcatacagtcttgtttggataaaaaaaaattatatgcctttatagaagaagaaaattaaaaaaaaaagtttttatttacactaaaattaacttatacaaaagttaaaatcaactttttggagaagctaatcattgtctaaaaaactcattttacttcttttatgagttaattttagttaataagaatttttaatttattttttttcttatttttataagtatttataaaaaaaattatccaaataaaacttataaaactttggaaaataataatgggtggaaaatgttgaattaggtctaactttccaatctaagatccaaatatgatctatttacatataacttatttttaaattgtttttcatttggtctccacgtaaaaaaaaaaaaagtttgtatatcaatattcctaaaaatatacattttcgataaggtcacttctttttttcatgttctgatgtagtgaaagaaagtatgatataattaatgaatttatagcatggcttaatttctcatgcgtgattttactttatatttttttattataattcttatacatatatactttttcatcttaatctatgtacgaagagaacatattttaaacaaatttttataattattagttgttgtgcaatcgaggggagttaacatcaggaatatccatacacataaattgagagagcttagataattttgagtttgtttttttcactctatatatatctcttgtacattcacaattaataatgaataaaatcctaattatttcatcctttcaagatggtatcaaagagtcaggagcttaacagccaaattgatctttttttattcctcttttctttttgtttcctcatggtcacctaccattgcttccaatctacccattaaatttagcatttgccaattatcaaataactcatctccttgaagccaaaacttcttagtggttagatgacaaggatcacatcatgtcctccattcgaaaccattcatgttggttaagccttcttgcttctacctttttaggtggttaagtcattttgtttctgcctttcaagtgtttaagccattttttgtgctgcttctacctttcaggtggttaagccattttttttttgcttatcccttttagtgactatgactctccccgtagaccattttttttttaccttccatgtaattgctactttaagaaatggaaagtgactaggactctccctatagcatgaacacaccctcattacctctgataaatgttttatcacaccttgtttttgtgagaaattactctggtttttctttaggatttgtgttaataatttttttgtcaacaaattgtataaaatcattttagaaaccaaaggatagttttttaatgtttttgtgataattttgaatgttacaagagatgttttttgcttcaaggaagaaggagctacaaacttgatctcaccacatcaaaagaggataattgatccagtggagatggtgaagatttgttacagcgaagctacacctttccacaatgaatctccaagttggagaccttgaatttatcaaaaactcatcacagtgagttaatctctcaacccaacgggcaagaattagaagcatgaagatcaagtgcataagtcctttgattatattgtaatttaattgtagtgaattgtattctcactaaaacaaaaatcctttatggcaaaaaacaatataattctaagctctatatatgagcaaataacatccatgtaaaggacttttggttcattatatttgtgaaattcagaaatagaatttcaaactctctctctccctctcccttttcttcagttatgactttttttgtaggatccatttggatcctttatgatccaaacgagctaaatttcgagttattgagtgaaaaaagtagaattcaagtatggaattatctattttcctatcaattctcttagttaatgtcatcatatttcaattctatgtatagatgcatgttagtagtgatcaatcaagcttttagggattttgattgtgtggaaacaaattcaaaacctacatttgaattgagatagtgcaataatttggtttaaggaatgaaatcaagtgtttgcattgtagagattaactaatcaaactctaagttttacgttaaatcacctaagaaattaggaatttggtttagaactcaaggattaatcactaagaaattaagattagtcattttagtttgaatcttggtcgcatcgaattgagagattgattaggaacgaatttcacatgaagaattctaaagatttcatctcagcaacggttttcttctttcaaattcaattccactccaaaatttctttcaaaaagccaaaacaacttactttcaccataccaaattattaattagctacaacaaaattcttgttttcaaaaattaaaacttgagatattcgctatgtaacaccccgtaggcctccggtgcattaacattaataatatcatattagcacttgaagcatcaatataaaaactcagcggaagcatagaatcgtttttcttgatacattatgtatggaatcacaaatatcataaacaacacacccataagaaccaatatcataccctgctgatccagttttctcataacatacatcaataagtcagataacttaaacatacaggcagatagtcaaatatacaacagttatactcaggggaaagtcttatgtcataactcaaatcatagttctgtacatatatacatcagtttccacaccacactgtggtgatacaaaagaataacagccctcctcgagggtatacagaactatacatcagaaacaaaatcaaaatagagccttcaagctctccatgcggctcctcagtcaagcagcctagtctctactgggcctcctaccctgagactgatcttctcttctagaagggtcacctgaaacatataaatccccacacggggtgacataacacatctcaataagctcagggtccttgggaaatcattcccaccctggcccacagattcacaacacataaacaggcaaacacatcaaatatgacccaatggcctggccctctggccctcatcatatcataataatcatcatattctcaacacatgacaggtggcagagctcctcaatgcctggcagagctcctcaacaccctgacggagctcctcaacgtcagtacctgtcaagatatggcagagctccttaatgctatgggcggagctcctcaacgccctgaatacacggcagagctcctcaatgccggtattcatctattggtcaatagatatatctcaatcacagcatacatgtatccaatacagatgcacacaagatcaatataaataatgtcatagccaatgcatgcatcatgaatcatgaccaacactcccctaggagtgtggtgtgcaaccaaaacgggaattcatccccagggatactgaacttacctagtaaggtctcagtctgcagttctttcctaggtctgtggctcccgccaccaacagtctcaaaatcaaggcctaatcaacgcacatgcaaatctcatatcaaaaccagtccacagacatccaagtcacagtacatactataacagaattcctctatcctagggttcagtcaaactcagccccacacaaggctgttcacagaccattcaaggtccctcaaggctgaaagccaagcctctgagttatctggactcaatacacaatcatacatggcatagtttcctcagccttaacctcaattatcactagaacggactgagtttcactccaagtctcgttcaactagccacttgggctcagcacaatgcaatcaaggctctagcctatcagagaaccatcaacaagtgactctacacaagtcacacaggcatatacagagtcaagattcaaagtcatcaaaatcaaaaactgaaagctaatccttcatcactaccttgctctgagcaagtttctcttctggaccctgggctaattctagcgccaactcatatgggtcactattcacaggaacccccaaatcccaaattaaccggagaaactcgagtttcttacctcagtgacgactagaaaagctgcaggactgctttcctaagctctgttgtctctgctaagccctgattcctcgccaaactcaagttccagggattttcctcccaagaggaaatctcaccaaaaggggttttgaaagaaaaagatgaaggattatagcttcctcagagtttctctcaagtttcacagctaaagggacttattaaggctaatatataaggtcctaaaagcttggaaatagctccaatggaggttgggaggtccaaggaagaagaaaactaatttcccctctccttttcgcgttttgacccttatatactgcccctgaccgacatgcggcgcccttggcgccactttggcactgatggcgccagcttccagtgtatctggcgcccttggcgccactccggcgctcctggcgccaacttccagcatctgtggcactcctggtgccacactggcgctcctgacgccaacttccagcacctgtggcgctcctggcgccacaccgacgctcttggcgccaacttccagcaccggtggcgctcttggcgccacatttagaattagcctatgtacccccggtagtacataggcttgttggcgtgataccttctattctgcttaatttctgatattttcacctgctatatactaaaacacctcatgaaggcacataagctatatacttaccgaaaggaagctatttatttcttttactcctttttataaaaagcctaggttattatacgctacaacgaattgacaacttggtgtagctaatgcttctaaaaactagttattgatttcctttatattacacatagtctttgtggatacgataagtcaaacacttattgtttctttctacaattagaataggttcacttgcctatcttgaaaatagccaacaagaattggcgccattgtcgaggatttgtgtttcaacaattaggcaattggcaattttcttatttattagctggttttaatttcaatttaattctataattcattcattatttacattgatacttgtgccattgaatttcactctttctttgattctttatggttactaacaatctaacatattccttgagttgtgtagtttgttacatgtgtaggtcttatgcattgagaagcaacacacctaagggaacaatagttgattatgattcatcccaggtatatttttccagattctacatttgtaaatttgtagaggtgagtgcatgagtgtactctctatagtgaattgacaactggttgcaatgagctcacgttttcactcttggaatctttctgtttctatgattcgctatgtcggagaagaatcttgccacaactaatctggaattgttcctaggaataattttgtttgccaattcgccatggaagagaggatgatcaatcctaaaccttaaattcaaatagagggttgagattaaaatctccacgtaaaaattcacttagtcggtgcttcctgaactcattccaggcctttgattgttttgtttccaacattcgagtagtgggttagttctttcaaaggttccgtcctggtttttcatcatcgtcctagttagttttggtcttgttttcttcatatatgacttcttctagaaacttagtaagtagtggaaggagtggccacccttggtgttcatattgtaagaggaaaggtcatactcaagtatcttgttacaacttggatggcttccctcgaaaaacaacaaatgtctccaaggaaagaatttctaaacatctattatctcaagttgagtatctagaatatctttggttgaattccaacaaccaaacttaatcatcttcaacctttagtattcaattgcttgtttttctcaatatgtggacagtcaaggtctacgggtgattgattcaagtgcttctaccatatttctaataatgcctctttgtttacctttatgtcttcccaaaaattcctcacctcataaccttagccaatgacttcaaggtagattccaaaggtgttggtcaaattccactgtcttcttccttgaacttacaatctactatttttgttcctaatcgtccctttaatctaatctccctaagtcaattaaccgagtctttagatctttttgtaacgttttgtattgattcttttgttatacaggaacgtggtacgagacaaacaattgaagtaggacatgaatcaagaggactctactatctagaaactaattcctttgtgttatgtttggcaaccccatctcccaaacttattcatcattgcctaggtcatccaaatttgtcaaagttaaagaaaatggttcctattcttgataaactacaattgttagaatgtgaatcatgcaattctcctttttctactattcaattcattcagatatttggggtccaaatcgtgtaacgtcctttaggtttagacattttgtcacctttattgatgagtattcttggtgtatttgggtttatttgatgaaagatagatatgaacttttacctatctttgtatccttcttcaatgaaatcaagaaccaatttagtaaaataattaaaatcctctggagtgacattgccaaagaataattttcttttgctttctcttccttttatcctcacagggcattttgcatcaatctactagtcaccatacaccacaacaaaatggaataacataaaggaaaaatagacatctagttgagactgcatgcaccttattgctcaaagcaaatgttcttgttcatcattggggtgaagaagtttccactacttgttttctaataaatcaaatgccttcttccacacttgataataaatctctcattttcattatctctccaaatgaacccttatatcatgtttctccaaatgaagatgcctcttttttctcatcatccatgcaagatttcaactctatccaataggttttacctgtcccatcctccaatccaattgtgtgtcctacctctgagacttcccaccaagaagaaaattggtcttactctccagccaacagtctagtttaactatcttcagctccttctgtgacatgccaacacaggacgtaaggaactggtccaacattagatgaagattcttctagttcatgtccttctccattggcttcccctacatcacattcttctccttcatcacctccttatgatgaagacttggattggcccattgctcttcggaaaggtatttgatctattcgaaacccttatcctaattatttaagttatcaccttttgtctccttcatacttctcctttatttcctccatgttttccattattgttcccaagaatgtttatgaagcacttgctcaccgtggatggtgacaagtcgtgactgttgaaatgcaggctcttaaacatagtggtacatgggagttagttcctcttcctcctgggaaaaaattaattgattgtagatgggtctatgctattaaagttgtccctattggtgaagttgatcgtcttaaggcccacatggtggccaaaggctacacttatatatatggccttgattatagggataccttttctcatgtgctgaagatcattaatgttcatcttttccttgccatggctattatctgtcactagactcttcattatttagacattaaaaatttccttcttcatggtgagttgcaagagaagatttacatagagcaacctcctaggtttgttgcttaggggcagtctggtctagtttgcaaacttaatcaatctctctatagactcaaatagtctccaagggcttggtttggaaagttcagtcaagttgggatgaaacacagtgaagcagaccatttagttttttattgtcacacatctcctggtaaatgtgttatctggttgtttaggttgatgatattctcattataggaaatgatcttgctaaaatttctcaactgaaaagccatttatgcagtcattttcaaactaaaagatctcaatagtttaaaataatttattggtattgaggttgcccaatccctatatggtattgtgatctcacaaaggaaatatgctctagatatcttagaggagacaagcatgataaactgtaggcctattgacagtcccatggatcctaattagaaattcatgatagaccatggtgaaccatagtctaacgcagagagatatcaaagttagttggtaagttcatctaccttacaattactagacctaacatatcttttgtagatggagtagttagtcagttcatgaaatctctttaggttgatcattggaatgcagaggtctgcatccttaggtacattaaatggactctgggttaaggattattgtatgaagataaaggaaatgcccaagttgttgggtattgtgatgcagaatgggcaacatccctaattgatagacgttctacttcaggttattgtgtatcaattggaggaaatattgtttcctggaaaagcaagaaacaaagtgttgttgcttgctcaagtgttgaagcagagttcaggccatggccttggctacttgcaaacttgtctggatcaaacaacttcttcaagagtttaagttctatgaaatttagcaaatgaagctatgttgtgacaaccaagatcttctcattgcttctaatccagtttttcatgagaggactaaacatatagagattgattgttatttcagtcgagaaaacagcgttgtccaagatcattaagaaggccaagaattcagtttatttgttccaagcttgatgcacttgatctatatgctccaacttaagaggagtgttagattaatatgctgcaatatgtattttgtgtgctttattagcaatctattatttactcatttcctcattttttgtacttattgacctttggtctatatatatataaaatgtcttcagctgagtgagaaactcagtcaagtattatccccaaatattgtgtctcaactacttccttttcacataataaagagtgtcacatacataattcatggcaacttaaaatcataaagcactttaataactaataagatgtattggctcacacatgactgtacaaatccttaaaagaatattaaaggaattaaatctactattttaaagttccaaagctaaaggaaatagaaaatcatatatccaaactcaatgtgaaagtcttgttaaagcttaccaaatccaattataagtagagggtggcaacaggccaaacaagctatcaaggactcacaatctagcccatgaaagctttgacctaacatggcatgttattaaagggtcaggcttaagcttcttaaaaaaattaattaaaaagatcaaactttaggctttaaaaaaacctattaggcttaataggccaccttgtttataaaatattacacacacacatataattattaacattaataatacatttttaataaaaataatttaatttaaaaattgaaatatcttatacaaattagtttctcatttatgcttttcacactttagttcactttcaaaccttaaaatagaaggcaaaaactctactacgacacggttcaccatttggtagttaccacacctccactacttctcacaaactctaacaaaacccttcttgtgtcgcacatcgcttccaggtcacatgtcatctctagatagcatgtcactctggtaaggtagtgtacaccctttacccatatttgcatataaaaaataaacattgcaaaaaaaatacggttttttaaaacatttttgcaagaaatatcatgctctccttttacatatcaacttaaatctcacaaacactttaaaaaaatgtttgacactcaaaatgccatacaatctttaataaaaacactcagatttttaaatatctaaaacaatataaataagtctaaagtttaaaaggcataaaatatctgatttcacgtctataagagcatggcacatcccaactaaaaagtgtaatcaaggcaaatgtctcctcgttacgatcataccagaaattacctacaaacaaaaaatatccaagaaacacacaaaatagggatgtagatacgtctcactacattctcacaatgcaactgttagactattggcaagcgtatcaatgtcgttgcaggttacagaatttataaagagatcgtcttcatagggacttaagctactcaatttttcagataaaagtaaacagttcaatagttatgtacaacaaatataattaaaatttcatgagtttacggaaataacagaaataaaggattagtgcgtcggaaatacaaatttacgaaaactagtaaaatgaatttaattaattcaagagaacgtgtgattggattttatcattcacaccctcagtatccaaataatattaaaacatatgaatcattttctaaaattactgatgcacacattaattcaccccgaatagatccctcgcattcgagaatcctaaagatatttactaaatatcgattcctcgcatatgaagtaaataacttaacattacaatcataatcttgtgctatttgcaattaaaacgttatgctttattcctagcaacataacgtaaagagtaaaatcattcagttcaaattctaagaacactttccagtcaaacatagaatctaatttcatgaaactagtgatcaagtagaatcaagcattacgaatagaataaaatcaccagtaatgagtagaaaagattcatatatatatatatatatatatatatatatatatatatatatatcaaaagagatacataagggcacgaagattacatccaatccttaggagaaactactcgatcattgtgtaaagcacaagatcaacagaagaaatgatgaaggatgcgatccacaatcacttctctgcagctccagctccacttttctctcttctctttccttggtttgtttctacctccttggttttcattctctctctctattggtctgctgaagctcccattgcatagctttttatacaaatttggtccaagaggtgccagaccaactcacccaagtgagttggctacttctggctgaagcaaggtcatactcgcccagacgagttggttgcttagaaagaagtaatcacattagcccaggcgagttgatcgctagcctagacgaattgcactctggaaatttgtaaattgacccttttacccttcattttggcttggtttctagatccaacaaatacttatcagagattaagggcaaaaaggtcaattttacatggatgaatcttccaaatttaaacaacaacatttataactgtacaaaatattaaacaactagaattaagggaagtttataataaaactattgaaatcaaaagataagtgctagaagcattatgatctcaaaaataactaaaatatgatacttatcaactcgcccaacctagaatcttgcttgtcctcaagcaaagtatagaaataaaactatgaaaataaaaatgctttaatactcctataccaaaactatgagcatgatttgtaaagaatcaacctctaaagtgatcagaaaaacattttcaaataatcaagaatgaaaacacaaaagatgaaattcaccgaaccaaatgagagcaagatcaattcacatgttgtttctaaagaacatcacctaaaacaccttattcatttaaacaaaggaaaacttctcaaaggtgtttaattctcccatagacaagtatttcatcttaattccatcactgatacattataaatcaattttgcaatttattttccattaaatcaaatataaagttcataatcatcatggatcattaggacttttagggttaggtctggcttgaaagaaatcttggttttttctggatattcaaaattaacctgagaataggagagcaaacataaaaacaagctaccataacttcctatctcttgccttttctaccaagttatcaatatttcttataccaaaatcaatcacccaacttatagaatttacaacaactctgtacagtttagaacataatgtatataattcatacattcatttattcataaagaacttgtttcccttttcttttctatacaaaatttaatttacatgaatagccacatttaaaaaagtatttacatcacattagccaccaaatgatagaagttcccaacaaaacccctttgctctcctaacctaaggtaaggtaggaaactcttatcctaggttagtgttccaacaaaatatcaagtgtttggctcaaagggcttgcaaatggtaaaacagtatacattaggatagctttttttggctagagacttaaaatgtacaagaaagaaagaatgcctaaatcatatctatgcatcatatgttatgacaattagaaattcatgcaaaaagaactataaagcatattgtaacgacctaatttctacttatttttattatctttattattatttgcttaaggataaatttctgagaaacttatattagtgaaatttctaaaacataaaatgtacaaatatagacttaatattgtacatagccatagttcttgttacaaaagtcaatacaaatacagtactttccatatttcagactaatacataacttccttcattactccagctcctcaatgaacatgaccatgattgttatctaagaaaaacatgaaacaaaactttgtgagaaataaaatttctcagtaggcaaagctaaatcccaaacttattagtaggttagtcaatcatcaatatccaaacacatcaatacgaaatatgcaactatatgaatgcatgagatgaactatcccagggtgcaatggcctccacatatcgtactgtatgtggctacaccttgtactggatgtagacgctgttatagtcttacgcaaacatgcatgaatattgtcatgtatcctgcacctgggtactacatatcgtactatatgtagcatcagattctgtttctccaaagcctagtactggacttggaaatagtaatccacctatcttatcttatcacatcaatatccatccataataaaaatcaaactcataagcaaaatacatattaccttatggaaaaatattttcatcatatcatcatatgtatcataagtatggttacaccaccataatatgtatcataagtatggttacaccaccataccttaatcaagtaagattgttaccaaattttatgcataaccagagaatagtttttaactatagaaaaattatgttaataatctaactaataatcctcaatataaataatatctaattcctttaacacttcacaagaaaagattcaaacctagtatgcatcatgattcttctttcacttaccacctttactaattaattctcacaatgaatcattcaagtatttaaaccattcaactacataccattcatcctctacttctaaaatttaaatcaaaacatttccataaaaatatcaacagacaacccaaaatatcatcaaaatcaccttcaaaagatcatcaattggtcttccatacatcactaatctttatgcatataaatcaacacctatcttatggcttaaatcaacatattctcatcaaagaacaaccttcaatatcacgaaatttcaagcctaaataataaccataaatcatcctactaaagcatgtaaattaatccaaaccattgattaactagagatttaagcttagcctacctcaagtgagtttgactcttgaatttgaatggataaatgacttccttccttccttccttccttccttccttgggaaatcctctaagagatgaagccttgatatccttctactaaacttgacaagaactcttcctaaggttactaggtttctcatgaaaattctctcaaggtgatgggtttgcttttctttcttgattcaagcttttaaaaaagaaagaagatggtttagggaaagagtggccacgtgaatgagctaggagggatggcttggaatggtttgcactttaaggttcaccctccccccctttatatagtgtttagaaaatattttaatatccaaggacatttttgcccttcctaactaaatgaccttcatttggttctaatctaactaaattaccttcatttaattcaatcctaacttaattacttctccttccattgaaatctaactaaggtcatgatgacttttctaaaaaatcttccaagtgaaatatatgccatacaagtgttctaactttatctatgtcatgattattgcctttccaagtgtcccaccacttggcatggccttaatgcttcttctcctaggcttccaagtgtccaaattcatgaaaattcccttggcttctcctaagttcacgtgcattatgaagggtgtagagaaatcttggcttgatttttatgttaccttgcatccatgccatacaagtgtcttccacttgttttcatcctatggcttgctttccaagtggcttatcatgaagtttcttcctccttctacaagattctccacgtgaaagacaagcttaaaggtaaggaatacaaatttttcttcctttcatgctacgtgtggtcatttatgatgatgaataaaattctagtttcaagtaaggctttttcacacagtattttcttaaaaatgaatctagttaaatttgaatttcttttatataattgggaaatattagaactctagatgttcctaagaatttatctcaatgatggtttaaattaatcacaagtagtgtatacaaagcaatatataaaccttacatactaaattgctttttatcttaattttgattggtctaaacttcttctgaccatcaaaattactaaacaattttgttaaataggtctatacatgctataattaagagaaaattccttagattatatgtatcattttttccatatttttcttatgcttgaattttcttaaataaagccttaaagttgttatcttgaaaaatttctagaaattttattctagagttttgtgtcgcaaattattttgatacttagtcagctaagtgtattctataattccatcatgtttctataaaatttctaaagttatttgagcattttttgcctaggggcatattggtaattttgccattcatcctagaggcattttggtcattttcaaaatatgcaagggcatttttgtaattttcatcctaagggtattctagtaatttctacttcatggaaagagtgatttagtcatttttcttcaaatatacttgtatccaaaaatcatcacatttccacaagtgtttaataaaattttgaggatgttacacatatcaatgaggacacttaatgtaaattatgtggttgtacatagtcactaaagcttaaggtctgtttctatgttcaaatcaaatcagtgtttcgaaagttgttctttattaagtcaatgtaaaaacatcttgcttcatttggcatttgggaaagtcattcattgtttttcattctcaaagtttccaaaaatcattttattgtgttctgatctaattcaaaaaacaagtttcaaaaacactatctgttgattctttccaaaaaaaacatgttatgtccaagaaaaattttctctttaggtcccaataaaagttaaaaattcaaaatagtaaataaggaaataaagtactgaattttaaattacaaaatggtaaagaaacatacagacaatgtcacaatttttttaagatcattgttgaggaggtcggtctcctccaataagataatcatcaagattgtcatgtcttcctcctcatctgctcttcctcttccctaaaaaatatgtttgtcaccaggccatgcaatggtagctctaacaaaacaaatgatatattcaaaaacataagacataaaattcaaaagtaaagtttagaaatataattcagaaacataagacataaaattcaaataatataaattaaagcaaagtttagaaacactaggttgcctcccagtaacgcttctttaacatctttttagttagacacccttgttatggctcatgcttcaagcaattggataacagtggtgagccaatggcttcaatgttttccttcaaaattttcaccaatttcttttcttcttcagaaagacttgaattactgataactggtttctatgaatcacttgcaagaaaaaaaaatgtggaggtactgctttcaactccatttttattcttgattcttcttttcctctgacaattcttcaaagagagattgatggtaaggaatttccttaaaagcatctagttgttggagacaatctgaactctcattttcttcacatttgctcatctcctcaaatgcttcagtcgatgttttctctaaacaatcttttctttgaatatacctcttggagtcagaaattactttatccaagacatcaactctaaaacactcccttggttcctttgggttaacctgtgtgtttgatggaaaaaggtccatttctatgctcggacaattgttttgcaagttctccaacctgaacttcaagatttttaatggaagcctcggtgttcttttgatttgtgatggacatatgcataaatcgagttagagtatcttccattttttacattctattaggctgagcttgttgttgttgttgtggtgaacccctatttgaagaacctgcataagatttgttagaaggacctgcaaaagaagagttagtgggaccatcatatacattatcattttgctggctccagccatgaggctaatttgaacctggaccacctctgtagccttggtaatttccttgaaagttttgttgaggtctggtttgattatgcaaataatgggcctcctcttcctgttagcaatcaccaggtgctaaacagtggccattttgatggtcaccgccatagaaataacatcttagaacttgttgaacttgatgagcttggtatgttttctatgattcaccttgttgaaattgttgaggaagttggcctatttgttttgttaagacctctatttgctaagtcaagagtttattctaagctagaattacatttggagtattcagctccattatacatttccttcgaaccagagaactatcatggtgaaactggtaatcaccggctgatatggagtcaatgattacaattgcttcctctgggatctttgacatcatagtacctccagctgaggtatcaagaatcatctttgtctgaggtctcaaaccattatagaaaatatgtagttgtgcaacatcaccaaagttatggtttggacacctccacaataaggatttgaatctctcccatgtctcatagagaggttcatcaaaccctagggaaaaagtagcaatggctgattttacactaatgaatctggatggaggaaagaatctcgcaatgaatttttcctccatttcttcccaagtgttaagacttttgtttggatgggattggagtcaggtatttgctttacctattaaggagaatagaaaagctatgaggtagacagcttcaacatcttcatcagaagctcccatggtactgcatattgtattttctttacctattaaggagaatagaaaagctatgaggtagacaaatgtgtatatggatcttcattatccattccagcaaaagggtgtaagccaatcaaactgagcaatgttggcttcaattccacaaccttgttactgaaaggaggaatgactatgctattgtaatgctttggtccttgttgataagcatagtcaccaagattcctccttagttgtctatttccttctcctcctctatcagccctaatatcaattacaagtggcttttctagtgaaggagagtcaatagaagaagattcatcggcggcttactgattacttgtttctttttcattatgttctttcttttagtctaggtaatttttggatcaaataatgatttatctacaggaaatttacctcgcataaaagaaaaagaacaaactacaacaacccgtaagtactgaggtattttttaaaattttatacctacttttatataactagttatagttattttttaaaattatttttttagcatccctaggcttagcacataaatattcaatatttttaaatgaaaaatatattaaatgactttaagaactagccactagataagtttaatagattttatataataactttttatttaattttcacatatttaaaactatgtactattttaattttaaagaaaatcaataccaaaattttttgtgtttgttaaaactttagcaatataataaatattttttattatattataagtgtgatgtgactatttattttcttaagtaatatatcgaaatcaagtcttttgaattaaaaaatgtaattttaataaaaaaataattatcaaaaaaattgataaacattctacaccaatatcaaaatgataaaaacaaaatcttatttaaaaaatttaaacacatttccactcctaccattttatgttaatttctttctttactcaacaaacttatattcattccttatattctacttccattaaaataattcctgaatgaaataatatgagttatatatataaacttgttaatatggaattatggttgtgccttgtgttggggtaacgtgagcaaaccctgctgcatgcttcgaagcagacaacgaaacaaacagcagataacggtaacggacttcgcgcttcctaccttccgtctgtctccgtttcgttccgttaccccaaaccacacgcttcttgatgagccgtcctccgtttcacaccacgcccaccacacatatttcaacactgatactaatatagtaatattcaagaaatagaattgttttttaccatttactttgacttcttcaccttctgactatgacgaggaggagactaattaagtaaacgtactgtggttaaatcaaaagttaaggtttaattattaatttgaaatttcaaaatgtccccagaagtataatatgttaatactattaccaaaattattgttataagatacttactctgttacttatatatgagatataattattcaattcattaaaattaaaaaaataattaatttaaatggtaataataaaattataactgtaattaatacttttatttttttcattatttgtaaatacattctttcttctctttaaattaggggtattttttgtctaaaaagaattattataaggaccatcttgttaaaaaaataaacatatatcattttaaatttggatattataaataggtttgtttgaaactgtcataaaaattctagaacttttgtgtcattagaaaatttttaggataaacattcattttaatctctaaaatataataagtggtcacttaagtatccaaaagtattaaaatttaaaaatgatttatggaaatgtaatttatttgttattttaatttttttcgttaaagattttggataaagttaatgtatttttctacatgacatttgatgtatagctgatagttgacagtatacatgtgatagtctagtcaatgattaaaatgagtataactaaattaccacgtatcatttatgagtagattgttatttcacgagtagattgtcatttatgcctgccttatcaattgtcacataagtaaataacatataacataaatacaagcaagcattaactttattgaaagtcttttgacaacaagctaattaaggtgacaaacaaattgtaattttaggaaattttaatattttcataacctaagtgacagtggattaaacatcaaggtactaaaatgacattttgcccaaagttttataggagtgttatatagatccaagttaatgagaataaaaaaaataacaaacaaaggttctcataaagacatagatttaaatgtgagaactttattattagataatttgtaagtatttttataaatacttatttaactcctcatgagaccaaaacctaactcggcaacttaactaaacctttttccataaaaaaagaaaaagaaaaagtgacaacatagattaaaatatgttaaattgcttatcaaagactaaatttgcaatttttacatattacattaagacagtaaagtacaaatatatatatatatatataattaaactaaaagttaattttttcccttaaattcaaaatactttaacgtcattgctcacatttaggtgaatatatattatgctgtatatggtttggagcattgctaagatttcattttaaccatcagagtataaacacatttacttataaccaaaaatattttataaaagttttttattattataacttaaaaaacttgtaatcaaattgctacaattgggtctcctgatatttctttcatttataataaaattccaatccaatttctaattaagaatttatcatattatgttgatgtgacccatatgtgaaagctaatatgttcctaacgcatgttgacatgaagtttacatggtcttaatgtgataataaagtggtgtgctaaggtagtatacaaaaatggcatgaattaacaaagtgttgaagatgggaatcaaatcttagtccttaaagttcactgataatactagactaatgattttatttgatatataaataaataataattatatcatatataattttgttagacaatttattgatgtgattaacaaatttaatcactttttttctttattttctcaagcatacttagaagacataagaactaactattatttcatcttttttccgaatctcattagaaagcatgagaaaatcactcaataagtgatgaaaaattataatttttggggtgtttaatcaccaaaaattgtttaattcatttggggggagggttaatcaccacaaattatttaattcaattgtaatcaaattactcgtataagtttgttagtcacgtcagattaccatctaactgagttagcattgaagacaacaaaaatatgttttatttttataggaatcaaattaatatgaaaaatttatgaagtcaaaattaatatttttaaaattttacagaaaccccaatcatattttatccctaatttatatattatgaaataaataaataaaaacttagtggttttattgttattggtgaccactatcataatgtttggtcatgaaaggggagagatttttataaacattttttttcaatggttaggagaatgagagaatggatggaagataaattcattttcaggctctttatctaattttttttctcttcttcaatattagagggatttggagggaaggaaagtggatttaaaacatgtcacttgtgataattaaagtatcattatgttatgaaatttaaaattataaaaataaaaaaaagtaaattaatatttaaaattccttctcttttctatgaaccaaacaagaaaatgcttatctggcctcctcttcattaaaatccttcccttttccttctcttaacaagtgtaatgtctaattgaaatctctaccctctattaaaggaaattccatgaaccttaaaccttgagatggttgagtttcaaaaacattttaatgatgtattaaccttgatggtagttaaagcaataaggattagtatgaaaatcatagaataaattaattagaaaatagtccttttttaagagaattaggaaagagtcctaaattttcaaaattacactaaattgtattgtagtgtagaaaaatgcttttttataagcaaacatttttctaggagaccaatatttgaaaaaatgaacagaaacatgtttaggatgaaacttatattttttcaattttttctaaacctatctagtaggataattaccccacaaaactaagtttattttaaaaaaaaaaacaaatcaacttaagttattgctcctaattgggtccttaagtgtcttaaattgacttcaaaaacaaataatgttgacaaggtttcgaattttggatttataacaatccaagagccagggcatgacactacttcactttatatgcaaaagattgtattttagttcattaatttatttataaaaataattgtgaataaatttttacatttaaaaacctaatagtttaaaagttctcaattctaagataaatgcatccatcgttgtataaacaattaaataaaaccatatgacactacaattcacaaccaaaaggtaccacattagagcaattcaatacatacatacaaatatatagaaactcttacaaaagagacataataaatatgttaattggtcgacactataaaacaaagataaaaacaaaaagggacgaagagagtcacgcctctccaggctcatctatgtcttccatgatgctcccaaaaaatagactcatttcactcgaccatttgctctaaaaaacacaatgtttgagattatcatagttgcaaccatatgtaccacaatacaaggatatgtgtgggtgtgtgtggtgggtgggtgggtgggtgtatgcgtgctcaagtaagtacgtgaattagttgagaatgaaattgaaaagggtgagatggaacctggtatttatagagtgatatgggagcttcgggtccttgtttgttgggcctgatacagtgatgtaacaacccttgcaaataattcttaacttgtagataatagctagtagataagttgtgacttataaataattgctagtagataatttataacttgtagataatcaaatgaattatagataattcatcgcttatagataattaagtacctgtcacttgataagagagttgtatcattatcaataatattcaaatattaagatatttagagataatctgtcagctcggtatcattatcatcatcatgaagatacttatttcctctatatccatgattagatatgtcaaaaggattcctgctatattttaaaacattttcatgatttccagtaccttcaacaaatatggaaagactactctttaaagtattaaacttcccatgaagcctttcaacatcatgatgaggttttaaagaagagtcttcttcgtgtttcaaaatcttttcctttaaagtcttaatttatcttttgagtcttaacacattttttgcatgttcatccaaatgagactctttgactaagtgcttaaaagactcattttccaaccaaagataatgtttttctttctttacaaccttatgttctttggtcagttttgaatacttttttatttaaaattgttataacctttagaaagcatagaagagttagaaagaaattattttcttgtaaaaagaataaatcattgaaatctacctcatattcctcttgctcattttctgagcttttgtgacttgtgtttgccattaagaatatgttgacttcttcatttcctttctcttcaaagaatttaccgtctaggtttccccatgttgtcatgagactcttcttttgttgacatgatcaaagttgtcataatatttgcctagagatctaatttcagttaatatggtttgaaacctatattctcctgtcaacatgatcaaagttatcataatatgtgtctaaagacctaagttcatttaatatgatttgaaacctaagaacatactttgtattctttcgttttattccatattaaacaacttatattgacgcacaaataaactgagtctatttctttttacctcagtggaaccctgatatgttaaagcaagagtgtctcatatatgtttagtggttatgaagttgtgtgcctttgtatactcttcttcagataggacaaacataatgaaattgagagctttagaattcaataaatatctttgcttttgctcatcacttcatctactatgagggatttcgttcaatcactcatctagaggtatatagttgtcattttctactatgtcacacatgtcaatatgacatgattaaaaaaggcaataatcttctgcttcaaatagtcatacttgactcccttgaagaaaaatgatctattcacatcttgtccttcattttccaacttcctccagatcttttctacccctatattgttagatgctcaatcccaagaggtcaagttctgataccaattgaaataaaagaaacaccctagaaggaggttgaatagtgtgtatgtgaatattaaaaaccttttgcaaaataaactactacaatgaacacatttaacattgattctagaaggcatactgcatcagttatagaagtgatgttgtctaacacaatgttaaatgtatgacatattctacatcagttttgttagttacatataagtgttttcaacacttgaagtgaaaaattatgatctattttgcattcaaaatatacaacaataataaatagagaaaaatagatttgtatcatgtaccctgattcacgttcttgaaacaacaaaatttttcaatagtatgaacactctatgtgtatccacatcgagaccaatctcttctatcaactcttgatgagcaaaattctaaagagaaaatcctctttctacttttcaagtctaaaaatagacttgaaattttcttgtttgttccagtacactttgcattcaggtagatgcttttatttacaatgttaaagagatatgaatttcagtcttcttaaaaaaggagagattatatttaaaataatttcgtatctctttatctttatatttgaaaataaaaagtatctcatatctttttatctcaataagctttttgatataagacaaagataattttcaaataaacatgactaattataataactaatcacatgatttgatcctaatatgtagcaatatattcttattttatggacaactttcacatttataaaataatactctttgtttatattaattatattcttagagctagcaaataatataataatatgtcactaaaatatttatctgattaaattaaattctctaatttaattatcaaataaattattttcttttgcaaagattgaaacactcgtttgtgtgtgacctcataggttcaatactaaatcggtagtaaattaatcataattaatatactaatcacggtagcatttaacaacactccttaaagtttagataacataaattagcatcttttaccttcaagaatcaatagaagaataatacaaggttaactctagaatattctattcaagtgaaactctaataagttaccgtattatatttaatcaatgaatgacttaagaaaccgttttcttttttcattcaattaccttgaccaaggccttaattttatcatagaactcaaacttattacttagagttgatggattcctttattgattaatcattaattctacaaatatttaatcatatccaatattcaattcatttaactagtgccctaagatattaggtgtccaaaattaaaatatattagttaagtttgatggaagtgttttctttaaaaaaaaactatttaaactatttcaaaaaaacagtatatttttattgttgtaatttccttctattagaattaattgaataaattattttttatgaaattttttatcactccaaactttctttccttagaacttcaattctttttaaatttttaaagatatttttcatagaattttatgaatattcatataaaataacacattgagtatggatagagataatattggatgaaaaagtcgtatacatttccagtaaaaaaaagctgcatacaatttaactatttttcattagttagttatatataaatagaaaaaaagccttatgctatttctttttttattagtggaaagccttatgtattgcttgaagtctatgtttattaataacaattctatattcttttttacattttcttatgaagagttatatttagatagaccagctaataaattttaattttaaattataatcaatattaattcataaaatgatttcaaaaacatttctaataaaattgcgaatatctataattctgtcattttactacccacgtatatgcaccatatatcacactgatcaaaggctggtaaagttcatatattgatttcggaatctcaatttgctgtttttatgattcaatgcatattatattgtgataattgtttctagtacaaaatcaatttctttttatattcaggtttgtgcttatgttttcagtttaatttgtgttgtccagatttttacagtctcattttttaaaagtttggtgtgtcctgctgcttaacattcacaatctaggtggacttgctttgatgtaacttgaaaatgaaaaaagatttagatatgagatacttcttcaaatctattattgataattgattattttgtttcaactaacagcttttttagttttatgtttgatgaaaaatctaatttttaaaaattcgattattctgtgtcgttaacattctgaaggatgatattattaacgacaaatgtatttttttcatcacatttttttaaaatctttttcgcttttgtctcctcacaaaaataacaggataattttcaatttgatttcttttattctcgaaccaaatagcatcaagttgtgttcgttttaaagaaaagaaaagaggtgaaattaaaaataccataagaggataatttccaattttatttctttcattctagaaccatataacagtgcaaattctatcctatttttatttttggtctttattttttctctttcttcctatttttcattttctttccaaaagaagtgtcatacaaaatctgtttcacctcatcccgtattaaatttgacatccttacaaaatttaaccatcatgaattttcataaaactctcgcccataattttatgaagataccacttgaattagaaaattccaataaacatattttctttataaaaaaaaggtgaatttagtttcataacttaccgaaaacatatcagaattcaagattaaaaaatacttataaaattacttacaaattacttacaaattaattagattctcacgtgaattgctaaaatcaatttcacattcttttcctttagagatataaactttggtattggacctaccttgttacttacaaacttaccttcacattagtagtactaatttacaacattattttcaatactatatttgctaccatttcaaatttttcacagaaaattaataccaatactacgtcacggtgtactttaataatcactcaatagatacaaaagcctttacgttaaaaagtaattttcataatacataaattgacacaatgataagatttcgttatatttatatgtgaaaaacaatttatttaatatgaaaatatatgtttgattttattttttaagtaatttttttgaataagtaataactatatattataagtgaaattaatttttatgtaatgaattgatagatatctacaactaataaaaaatgataatttcaataaaaaagatattccttctgtttctttttaactatcggattttgaaaagattatttctatttatatattattaaattcaagatcacattaattattatttataaattatactcttattttaatttatacatatatttatggtggagtgagagaaaaaaagaaatcacacaattattttaataaaataaaaagattatattttttgttttaaaaaataatcttaaatgacaaataaaaagaatgaaagtagtatgtactttatcttcctaaaaaatatattttaggatgaattattcaccttataaaaggagtaaatggcctattattcaaaaaacaaaaagaaataaggcactatttccccctcctgtggctgtttcgtagtccatgtcggaaaactatgttagtaacaacttccaaaaatttaactcccattattgcccttaagttccactcatctaaataaagaaagtatatttttttctctccattatctcttttatttgtttaaatacattgaaattgagccaaacaaaagattttggtacatctgctagttttttttgtacataaacaaaagagtttttacaaaacatatataataaatatattaatatttagaataattattttaaaaatatatctaacttaggtcacgttatgtaagatattttagttattttttaaattttttattagttgaaaaacttgtttaattattcaataaataatttttttagtaacttcttagattatatttaacaaaattaatagaaaagttatctgaagttaaaagtgaaagataaaattaacttattaaattagaagttttagacaaaactaaaataacagaaaaaataataaaatcatgatttatttgaaaaaggtaataaaaaaatgaataaatatattaatgataaaagtaaaagaagatataaaaattagaagttagtattttacaaagcactacttaaaatagtgtttagaaaatgataaatctactaaataaattttaccaaacaattaaatgaacttttcaattattaaaattttttagaaattaactaaaatgtcttatcaaacatatttttaatctttttttaaaacattgtttgaaatatcgttttataaaacactaacttctaatttttaatattttttcgattttatctttaatatatttatttagttttcatgtttctttttttaaaataaatcataattttattattttatatttttaaatattttaatatttaattttatcaaatacttataatttaataaattaaaatctttcctatgctaacttttgagctattttgctaaatataattaatttctagaaaatttataaataaattaatatgtagaaaagaaacaccaaaaattttatttggtactactactaactacatcatgtaaaaaaagtaaaacgagcactaactagtgtataaacaacaagcatgtctagtaacaactagcacacaagtcacacagccactgaaataggcttgtttcttgtgtctggtgggaatagacaacacacaagcgacacacatgacacgacacaccacaagttgaaattaaataataacaaaaatagaaataaataaatgaggcaacgaaattggacaactatgtataaattaatgaacaaaaggagactgactcacttcgttacaacggagagagagagagagagagagagagagagtttagtttggtcattcattattccaaccgagtaacgccgtttctcttcttcccttcgtttcacaggcagagaccgcaacagcgtcgtcgtcgttcaacgaaacctcttcttcttcttcttctgaagagttttttttttttttttttttaactcttacgttagaagttgtcttcttctcagttttttaataacgggatctcgtaaaggggattcacttattattccgattggtaacagaacttgccaaacgaatcgttttgttttcgtgaatatttcttattttcttttctggggcgttgacttgggttgaaccatgttgagccgcgcggcgaatggtgaaggtgggtgtcgaatgattttttttttttttgtggaatttgaggtttctttctttttttgttttttgattaaagttgttgtttttgtttttgtagtggttggttctggtgagagtggtgaggatgagctgtatgagcagctttggaaggcttgcgcgggaccactggtggatgttcctcgtgttggccagagagtcttctattttccacaaggccacatggagcaagtaagttttttttttttttttttaattttatttttagaatatagttttttaatgtttttgttttaatttttgtgtttagttatgcagatataattttgtttttgttttgagagatttgtacatgaaacggctagaagaacgtgaattttgattttttttttttaatttattgttgttgttgatggttgtggtggtgtagttagaggcttcaacaaaccaggaactgaatcagaggattcctttgctgaagctccccacgaagatcctttgtagagttgtgaacgttcatttgctggtaattttttttatctcttgcaattatccttcatttttttttttaattgtgtgaatgggaaattatgttgggaaataatgaatcttgtttggttgtgttgggaagatggtggaagggggcatcttgtattttttttttaagtttctgttattatgttaaattgtggtgtagtcgcaatttcgacacaacccttgttgtgagaaattgtggacaaatgaggttgatgtgactgcaattgtggttatgtagattccaaaaaccttgatgttgtagtcaaaattgctgtcatggaccgtcttttaaaacgttgattattatgttatggggggaaactggtaaaggatatggaagcttaccttgaattttggcgtgttttaggctgagcaagaaacggacgaggtttacgcgcagatcactttggtgccggaatctaatgtaaggatgttgatgccctttcgattttcagtattttcatggtcaaccttagattcttttccccaattgtttagattctaatggaataaatgtgttatagcaagatgagccaatgaacgctgacccatgcactgctgaacctccaagagcaccagttcactcgttcagcaaggtcttgacagcttcagataccagcacccatggtggcttctctgttctcaggaaacatgccacggaatgccttcctgcattggtaatgcgatctgtttcgttttttgttgactttcttgtttgtgtcctttttcagattgtcttattttggaaaactatgtttggatttgttttattaggacatgtcacaaccaacaccaactcaggaattggttgcgaaggatcttcatggttacgaatggcgctttaaacatatatttagaggtaaaggagattagaattgagaagttttcttttcagtccttgtgaattgtaatttaacgttccaattgcctatcgattttaccttgaacttgtttttcttttttatcaggtcagccgcgcaggcacttgctcacgactggctggagtacttttgtgacctccaagagattagttgctggagatacctttgtgtttttgaggtaaacattaattactttatttttgttagatttttcatatggtttagaaaatttctgggtttttactgtaagttcatgcaatatatgttctgttttgctatgcttttgttactttaactaagatgttgtgtgtagaggggacaatggggaattacgcgtgggcataagacgtctagctcgccaagcaagtagcatgccttcatcagtgatttctagtcagagcatgcacttgggagttcttgcaaccgcctctcatgctgttgcaactcagactcttttcgtagtatattacaagccaaggtagttactcgtttcaagaactagaaaatgtgttagtgataagtaattaatggatgattgttgacatgagttttatttgctcaggacgagccagttcatcatcggggtgaacaagtatttggagtctatgaacaacaagtttagtgttggcatgaggttcaagatgagatttgagggggatgattctgctgagactgacaaaaggtagtaaaatttatcaagttagttggtgtatttatgtgtttcatgtcgattcattctaatacaccattgatcagattttcgggtaccatagttggagtggaagatatttctcctcattgggtaaattcaaaatggcgatcactcaaggtattctcatctttcactttgaagttgttccttttatttttggtgattatatgtttctcatattttcatattttcatattttgtcaatctccaggttcagtgggatgaacctgcagccgttcccagacctgatagggtttcaccatgggagatagaacccttcgttgcttctgcttctacgccctcagttcaacctactatagtaaagactaaaaggccacgaccacccagcgaaactgtagatgttggtcagttacttttgtaataactcctctcatttcttatgttgattgaattatattggtttcgtttgacactggacaattactttcaaactatagacacaacatctgctgcttctgttttctgggatgctggtctgcaacaggctgacatggcacaaacaaatgttttggccgaaagcaaacggaatatgcaaactgacatgaatagtaaaagcaacagcggcaatgctatgttaaggaatcagacagaaggaagttggctatcttctccgcattctagttgtccatctcatgtgtttcaggatgcaacagatgatagcaagagcgtctcagcttggcctatttcaaagcctcactcatccagattgaacaatgatcacttgcttgaccatgttgacaaggagagcaaagttgagactgctacaagttatcggttgtttggaattgaccttattgatcattctaggaacactccttctgtagagaaggcatctgcacaagcaggaaatgcacccaaagttactactgaaggctgcaccagtaccttgtcccaaaccgatgctggccatatgtcggatgtaccaatggcttcttccaaggagaggaaacaagaacagcagcaagtatcaccaaaggagactcagagcaagcaaatttgtagaagtcgcaccaaggtgttgaacatagactgtttgtttagataaactgtttaaatttacaggtctaataagattttttctaacacgagttttccattgatgtttgaaacctgtcaaaaggttcaaatgcaaggtgttgcagtgggtcgtgctgtcgatttgaccatgttggatggatatgatcaacttataaatgaattggaggagatgtttgacataatgggacaacttcaacaccggaataagtgggaaattgtcttcaccgacgatgaaggtgacatgatgcttgtcggggatgatccatggccgtgagtatctatttaaacacaatgtttctgttgaaagaataagttgtaggaataatagtgctgattcaataagggaattggagagggaaaaaagaaaaagaaaaagtacaagtagataatatcataaattattgtagcactatgctgatttttatcatattttcttgcagtgaattctgtaatatggtgagaagaatcttcatttgttccagccaggatgtgaagaagatgagttgtggaagcaaactgccaatctcctcagtggaagacgggactgtaagctcagacacgaccgaaacctgaaacttttgacattctttcgtgtggtttttcgtttgtttgtcagcacccaaatgctgatccttcttgttgcttcaaattgtttgtgggaaggaagttggtctatttgggctgggtaagtttcatgttattagatgtgagacactagctaattgattgtaacttaatttgtagagacaccaggcattaattgtgctagaaaaaaaagacctaaacagatttctttaataaattagtagtgggaagatggaaaatttaggcttagtatatgtgaatattcatgttaagttggaagaagaatgttgggatgtttttaaagacttgccttttttggttaaggggcttattcattggtgatttatatgcatataatgtgcactttgtattaccctctaaaaattctaatatgggtgaggcgatgtctgttgctgccatcagtgaatgtaaattatggcattcaattgcttcaattgtattgttcagaaaatacagtggtccactgtgccagtgagtcactgattctcctgacaaatgggttgaattttgcagggtggtggcacccctcaaaattcaacaacagtaaaaatttcatgttaccactcaaatctccgtagagaagggttcaagcacacaatattttgttgggtttgagccataattccagcaattcccacacagggacaagacctattactacttactcttaagagtaagtcgtgaacatttacaaatttgacaaatttaactattgaatcatgacttattttaatgatcatgctgtaatatttaaaataaattgaatatttatagatatgtaaattatagtcaattgttaatatttatttatattttgaaaaacatactgtagttaattgataccgtattaaataactcttgctgtatatgaaaagatattaagcgaagtagcactgttgctgattctattttgtactaggctacgtttgagaattattaaatgttttttttgataaaaattcgctcatggataaatgtaacattcctattaataggagttgatgaaaccttagaagtgtaatttattgtcaatgtgcaacatgttattaacttgtcactgtttattcagtgaaaaataaataaaacttgttaccgtttatagtccttaagactggtgcgtaacatgaagcctattttttttttaaaaaaaatccttctttaacgaaatgcatatacatattgccaaccgaggttgtcttggagtaatatgatgtatattatttttaaaatagtttttttttaactaaaaaagagctgaaattgtgaaattgcagctgtctcaaattggtatataagctattttacatcattatcgtaaattataaatttatttcttgtattattacacttcctactagaatatcaaaatatgcatatatatatatatatatatatatatatatattttttttttaatattgtgaagttggctgtaattgcgttgtcatttttattttctgatatttggagccttgtcatttatcatttgtttccttgttttttttaccctttatcagtagggtctccctttcccagttgaatttgcctatatttttcgtccttaatttctgatctttaatctgatttcttattgctcatgtcgttagtgaaaatgcttgacactttagtttatagcatgtgcacatggaacgtgggatacaatggagagtttgtaaaatgagtttaatttttatatatttatagtataaagatttttacagtgtaaattaattataaactttacactatgagtactgattaaattcttgtaaaattgcaatgattagatgaaataaacaatttttcataaataataatatatgattagatgaaagtataaaaactttatactacaagtgctgattaaattcttgtaaaattgcaatacatttcaaaaccttgtattttttttaagtaatcaagtttcgttaagacttattgattcattaccaccacattaataatttcgtataaaaaaattgattaaaagaaacaattaagttgtcagtttattatcaatgtataaaaattaaaagtataatgttaagaatttattttgacttctcggtgcttttaaaaatgataaacgaaattttaccttaagaatcgattagaaagatttaaaggaaacctgcattttgtatataaaaaaaaaactactttgagaaataaaaaatgagtttaatatttatatactgattttatatcatcattcaatcataaattaccatttgaattatttaaaaataattattttaaaattcaacattataatttaattatgtaaaaaattttacattattaatgtataatattttttttaataaaatgtatttatgtcaaaaaggaataagtcactggtccatgttgttcccgccgtattgggaaagaaaagttcaatttttggttatgctgtgccaagagttggtctaattaatttgcacgaagtataccctccctaattcaaaatcgattgtgacatgatacagcaatgtcgactggtagctgtaccatttttattttattcccacaaaatatgataatgacaatatggtactccaaaaaatattaatttgattcttgagatctctaggctttgtttgggagttaggaggagaggggaagaaaagagattcaaggggaaggaagggaaaggaaagagaggaaaataagagaaatttctttctccttgtttgggagttaaaaatatattaagagagaaaaataaatagttaataagaaatttttacatttttttccttatttaaaaaattaatacattatatattttacactgattagggtaggataataattttattaacactgactggtataataataattttatttacttttccttctaaaaaccccccaaataggggggacaacaattttaaggctttggaggatttctgaggagttttgaaaatcctcaaatccttttcctcaaaaattaaaactcccaaacaaggagatgtctctacataaacctttcccttccctccattctcctccaaaattcctctcccaaacaaagcctgaggggatattgtatagttttgtactgtacagaggaacttgtatgtatattcaccatattatagtgtacagtgttatacagatgacatttgatgatgtcactttcagtatatgctttcaaactgcttaaactctgattgattatctgtttaattgtggtgtatgtttggtaatgaccctgattagtgaattggggcgttacattatggtatcagagccgtttgacaggggagcactgtacatatggtgaattgtgtgttgtatgtatgtgctagggtgttcattatggtaattgcatgtgtaactgttgagagtgagcttgatcaactcaccctctttatgtgatatgtacagtaccatggtgaggacccggaacctgtgtggtgaggtaggtgcagatgagcgccctgacccagtgatagccgccttgaccgctatgaagcaggagatagctgcaagcaggcaggctaatgaggccttgatgaaggtaaatgaagagatgatggctgagttgagagctcggcgtagagatgatcctccacatcctattcctgaggacgaggatagtcgccagataggaggagctagtcagcatgctgaggggtacagccatctcagaggtggaccctcccagtcatatgtagaggaggagactgtggctagagggagaatgcttacagctttccgtaagcatgattctcccatgttccatggagattatgatccagtggtggcggctcggtggttgcagtcactagaaaagatattcacagtgatggagtgttcagaccatcacagatttctctatgccacctacatgcttcatggagatgctcatgagtggtgggtgaccacatcagagctgatgagaggccagggggagactatcacctggtaggcttttgaggctcagttcctggatagatactttcctagagacgccaaagagcaaaagcaggcggagttcgagacccttgtccagggacagatgtcagttgatgaatatttggctaagttcaatgagttagccaaatatgctcatttcaggagagagttacctgataatgagattcttgcagctaagttccagaggggacttagagaggacatcgaggagaagatagctggcagtggatctagagatctggggagcctggttagacagtgcaggcaggtggaggacatgatcaggagacggaggggcagttgtcctactcttgttagcagacctgatgagaggagatctggtggtgcaggcccagccggtaggggcaagggcagaggtccgagagttgcttcctcttcagacaagttcaagaggagacagggtgataggccaccgagaccaggtccagcccccagatgtgccacttgtgggaagactcattggggtgtgtgccgttctggcatgatggcgtgctacagatgtggccagcctggtcactttgctagacagtgtccccaggccagagatcaggccatagctgctcctgtgatctcagtagcgcctgtcgcaggcaaggtttatacagttgatgcgagggaggcaaccaaagctccagatttgattcgaggtacagttctcattggtatgagtgatgtgagggttttgtttgattctagagccacccactcgttcatcagtgaccacactgctgcaagactggacttgcctatgtccagacttccttctcccatggaggtgaccacaaccttcagagagcagtgtagagtgaagaggtgttgcagagatgtacatttcttgtatgatgacagagagtatagtgtggatctgttttgtttgtctatgcctacccttgagatgattttgggtatggattggctgaccagatatggggtcatgctggattgttgtcataagagagtagttgtgccttcagaggatatcagcccgaattcagttgcattcctttcagtgttacaagctcgtaaagagctgagaggaggaactcaggggtatctgttgttgagtgcagcggtacagagacagggagtggatatatcagagattccggtggtgagagagtttgttgatgtgtttcctgatgaaattacacagcttccaccggacaagggaataaagttctccattgatctggttccaggtgtgggacccatatccatagctccataccgcatgtctcctttagagttaaaggagttgaaggcacagattgaggacttgttgtccaaggagtttatcagaccgagtgtatcaccgtggggagcaccggtcctgtttgtgaagaagaaggatggaagcatgaggttatgtgtggactacaggcaactgaataaggttactattaagaataagtatcctctgcctcgtattgatgacttattagatcagttgaggggagcctgtgtgttctccaagatagacctgagatccggataccatcagattcggattaagcccggagatgttccgaagacggctttcaggtcgaggtatgggcattatgagttccaggtcattccttttggtctgactaatgcaccagcagtgttcatggatcatatgaacagagttttcagaccatacctggatcagtttgtggttgtgtttatagatgatatactgatctattccaggagtcaggaagagcatgctgagcatcttagacttgtctttcagattctgagagatcatcagctgtatgctaaattctctaagtgtgagttttggctttcagaggtgaaattcctgggccatgtgatatctgcagaaggtgtatcaatggatccgagtaaggtggatgctgtgatgtcttgggagaggcccaagaatgtttcaaaggttcgtagtttccttggtcttgcaagatactacaggaggttcattcaggggttttcacagatgggagtacccttgactcgccttactagaaagggtaatctatttgtatggattcatgaatgtgaggagtgttttctgagtttgaaagagaagttgaccacaacactagtgttgattcttcctaatcctgagggatgttttgaggtatattgtgacgcttccaagcggggtcttggttgtgtgttgatgcaggataagcgggtagtggcttatgcttccagacagttgaagccacatggggagaattatcctacccatgatttagagctggcagctattgtatttgctctaaagatatggagacattacctatatggtgcccagttggtggttttcagtgaccacaagagcctcaagtatctgtttgatcagaaagagttgaacatgaggcagagacggtggatggagtttctcaaagattatgattttgagctgagataccatccaggcaaggcgaatgttgtagctgacgccttgagcaggaagcatctgagtgttgcctgcatgatgatctctgactgtgagctgattgaacagttcagagatatgcatttgacagtgactgagggtaccagtggtcttgagctaagtcggaccagagttgataatgagctgatacagaaaatccgagaggctcagaaacaggatgattctatgatagacctgttgggccgacgggagtttcactgggagcctgatgatttgatgatgtatcaggaccggattgtggtgcctaagggcgagatggttgatgtagttatgactgaggcccataaaggccagttcagtattcatccaggtgctaccaagatgtatcaggatctcaagaggagattttggtggccagggatgaagagagacatagctgagtatgtatcaagatgtttagtatgtcagaaggtaaagattgagcaccagagaccgtcagctttacttcagccattacagattcctgagtggaaatgggacagcatttccatggattttgtagttgggcttccgaggactcagactggatgtgattccatctgggtgattgttgatagactgactaagtctgctcacttcttgcctgtgaggtctgactacactgcagagaagttggctcagctgtatgtcagagagattgttagactacatggggttcctgagagcattgtcagtgacagagatcctaagttcacttccagattttggggtgcgcttcaggatgcatttgggacccagttgagactcagtacagcatatcatcctcagacagatggtcagactgagaggaccatccagacactagaggatatgttgagagtctgtgctttagagcaaggtaccagatgggatagatatctacctctggtggagttctcatataataacagttttcatgcgagtttaggcatgactccttatgaggccttgtatggccggagatgcaggactcctgtttgttggacagaggtaggtgagaggcaactattaggacctgacatggttcaagagacttctgagcagatcagattgatcagagataagttgttgagagctcagagtcgacagaagagtttctatgatcataaacacaggccgctacagtttgaggagggcgaccatgtgtttctgagactgtccccagtgactggtgttggacgggtattgggtgtgaggaagctgagccctagattcattggtccttaccagatactacagagagtaggaccagtggcttataggctagctttacctccccagttgtcaggattacatgatgtgtttcacgtgtcccagctcagaaagtatgtatcagatccttcatacgtggtggagcctgacacggtgcagattagagagaatctgacttgccctacacgaccagtgaggattttggaccgtacagagaagaagatcaggagtaagaccattcctatcatcaaggtttagtgggatggcagatcacctgaggaagcgacttgggaacgagagcaggagctgttacagctgtatctcgagttatgtgccaggtatgatcttaattttgcggacaaaattcttaaaaagggggggtgtaatgtaatgcctgggagtttaaacatatgattaagcctaagattagatcataatcaagcttagaagcttagattaagccggattaagcagaacagaaggtactgcgccaacaagcctatgtactaccgggggtacatagccaaattctgcatgccacccctgaagcgtgggaggccacgcctggagcgtgggaagtgctccagaaagttgattttcactggagtgccacgcctggagcgtgggatgccacgcctggggcgtgggaagcagcccagaaatgccattttgtctgccagcccacgcttggagcgtgggagtcacgacagaggcctataaaaggcccagaagctcgaaaatcttgatatttttcttcctttcttcttcctccttcgtccaaacctccattgatgagtttgagagttttgtatcttctccatctttcatctaaacacctctggcccaactgagaaagtgatcagagccccgagaggagagaaaaatcccgattgattctcgaggaagagcgagaaacagtgagattgattttctgagagaacccctgagagcttgaaacccagaggcgaaagaggccttgattgagcgagttaccttagggaaagtgattccctggtgtttctgggcttcacagaggtaagaaactcgagctctaaccgttggttctgtgtattggatttcggggttttggggttatcttgaggggtgttgttggaggtgttagagctgttattaggctcggactctgtagagtcttatgctcagaggactgttctgatgaatttagagccttgaatcatcattactgatgaagtttgattttggctctgagtcagtatgagcagagataaaaggttgactatttgactagtctggaccttagagcagttgacaaagttgctcatgagactatatagatgatatttgtgagttgaaactgatgataatgagaagttggttttaggctattgtaagcagagatatgcttgattataacttgatcagagtcttaagggagactttatagcctgatataggctgagagggatcctgttgaggatcagatgatcacttgtacagtgattagtttatgtttataggaaggatgagagttccctttcgcttgaacggtctagaaccgtatctgatatgttatatacttgttcttgtgtaggacgtgagcgtgagagctctggtggtgttgaccacgaggccgggagagccggtcatctgtctagagcaggtaagctcttggtttttgtttgtgtatcctctgctgtgttccaccatatatccactgggattatggttatgatatgtgtatagactagtaaaggaatgtgtactgatgttctgatccctatgagagggagattgagatgtattaatctgatatgcctgaaatgtgaactgaaccctgtgataggggattgatatgcatggctatgatgtgattgaattgtggcatgtctggttaaatgtgaaacctgattatgcatgttgtgcttgaataacatcctattgtcgtaggatagatgatttgagattgagtaagacctggtgagagatgagcctgtgatatggaggtagcctcctacgtggagatgttcccatatacacagaggtagcctccccaggcaattgtattgtgttagaggatgagatggccctgtgatacatagtgtaaggacccttatttttttttcttttcggcgcttaaccccgcgcgatagcgcggggattcaggttagaaagccggtgaaaggtgcttaaaaatgcaagttttatggctgttctggcatatggcgcgacccacttgaagggtggcgcgacacgcgccatatgtgttatacagggcagatggttctgccgtgccacgcgagtcgcgtgaagatccacgtgagtcgcgtgggaagtggtccagaaagcatggtttttcactggaactccacgcgagtcacttgggatccacgcgagtcgcgtggaaggcccgaagagatggcgcgagtcgcgtgggaggtcaagtgagtcgcgtgagaacgtcggcagaccagtttttaaaggccaaaacgtgagaaatggaggatatttccatttcttcttcctcccttggccccaacctccattgttgaagttctaaagctccttaggacttgattctcagcctaaacacttccctgagccttagaaacttgattgaaccgaatagaaagcttgaatccttcatcaatttctttgaaaatcccagattgagtgagaagaggaacctcagagggaaaagctcggagaactcgagcttggcgcagaaccactgcgtgattgggacacaggagcttaggaaagccgtcctgaggtgattggagtcgccactgaggtaagaaacgcaagtttcaccgtttgattttgattctgggggtccctgtgaatagtgacccatatgagctggggctagaataagcccagggtccagttgagaaagttgatcagggcctagattagatgaaggattagctttcagtttttgattctgatgactttggattttggctctgggatttgtcggtgtggcctgtgtgttgtatctaccttagtgtagaggccattccagagcttagactatgtctgttatgagcctatgaggctagttgaatggcacctggatagaggttaggccattcctgtggtttcgaatgtgaggaggctgatggtttctgccatgttatagccttcatgttatgatattatggcctagtgtgtgctaggctgaaatggttaaaccctaggacagaggacttatgtggttatgtgctgtgattgatgcctgtggtctgtatattgatatgagctatgtatgccttgtataggcgttgattctgagcttattggtggcgggagccacagagcagggactagaccacagggtgatattgtcccaggtaagttcagtgtttctggggaatgaattcccgttttggttgcacaccacactcctggggggtgttggtcatgattcatgatgcatgcattggctgtgacattgtttgtattgagattatgcatctgcatttgatttgtgctgtgtttgagatatctgttggccaatagatagatacaggcgttgaggatctccgccgtgtatcatgggcgttgaggatctccgctcagtggcatcgaggatctctgccacaccatgacaggtctgacgttgaggatctccgtcagtggcgttgaggatctccgccaggcattgaggatctctgccacctgtcatgtgattgagattatgatttgatttgatatgatgaggccagagggccatgtatgatgcatataccggttggtgtgctgtgaatctgtgggccagggtggggatgatttcccgaggaccctgagcttactgagataggttatctcaccccgggtggggcttatatgatttcaggtaatatatcaggacgagaagatcagtcccagggcaggaggcccagttgagactaggctgcttgatggagaagcgacgtggagagcttgaaggctctattttgttttgttttgatatatggttctgtatgccctcatggagggctgatattcttttgtagcaccacggcatgtgtggtgtggactctgatgtatatgtctgtacagaactttgatgatatgtatatgataatttccctgagtacatgtgtatgttttatttgttattactctgcctaaagatctgttatctgtcttattatgatattttgatgaactggatcagcagggacgtggtttatgtttctgtataggtgtgtgttatctgttagatttatattccatacataatgtatcaagaaaacgatcctgtgtttccgctgaactatatatttgctatttcatacgctaatctgatattattaatgataacacgtcggtagcctcgtgataagagatgttcctatgtacacagaggtagcctcaccaaaaggggatgtgcctgatatatagacgaagcctcgagatagagatgtacctatatatctagaggaagcctccgctagggatacatgcaggagatgtgcctagtatatagaggtagcctccctgtgaggagatgttcctatatacttagatgtagcctctgcatggcagttattgatgtgataaatggcttaatgccatgagtatgccttggttttggctgatgaatgtgtatagcctgattgtggtcaggtgtattgtgcatgatgaatgatttagtgattcactgataatgattgtgattgtggttgatatatatatatatatgtgtgtgtgtgtgtgtggtcagtaaccaggggaaggaaataccttcaagggccctgagtttactgagattttatatctcaccccttgtgtggggctatgttttgcaggtgattcttccagagtagcagagagatcccaaggcaagaagcctatgcaggattagctgctgatggacaccttaggctagagaacatgagcttgtgctctgatgctttgtatttagactttggttttgtattttgttgtaccctgaggggatattgtatagttttgtattgtacagaggaacttgtatgtatattcaccatattatagtgtacagtgttatacagatgacatttgatgatgtcactttcagtatatgcttccaaactgcttaaactctgattgattatctgtttaattgtggtgtatgtttggtaatgaccctgattagtgaattggggcgttacacctgatcacctcagtatttttgtgaaagtgataggaattcatggatactagaggaacaagaggaagagcagcaacacaagctggtggcaataatgaggaaataaatattcttcacgaaatgctaacaactatgcaagaacaagcggttgctgcaaatcaacaagcgactgcagcaagtcaacaaactgctgcagctactcaaatgatgatgcaactgaatcatcataatactaataataatcatggaagtaacaataattctaatcaagataatagaaggcaggtgactgatatagaatatcataagtttgttgagttaaaatgggttaaagaaattgaaagatatttactgtactagattgttctgatcaacagaaagtaacctatgctacatatatgttacaatctaatgctgagtattggtggaacagtcacaagcaaattctaacaggtaatggagtagagattacgtgggaggtgtttaagacagccttctatggtaagtattttcccatatcagtaagaaatgctaaggagcttgattttcttaggctgtcacaaggtaatagtagcgtgtctgaatatattgctaaatttgaagagttgattaaattttcctccacctatcaatataaccctgatgagcactggaagtgcatgaaatttgaagggggactgagggaagatatgttggaaaaagtgggacccctagaaattagggagtttggtgtcctgataaataagtgtcgattaatagaagaatataaaaagaggtatgttgaaaagaaagagttaagtaataattttaggaagaaattaggacctcagccttttaaatttaagaataagtttcagcagagaaaatttcagatagtggatacttatctatatatatatatatatatatatatataagtagccattatctattgttacatagatcagctcttttggttacattacttttattacattcatagaacttaattactaggaaacatctcagatactctagttaggattattatttatttacaaaaaaacctatagcgtatgtctccatttcaaaagttctctcccatgctctcttcttcactgaccaagttaattggctccatgggtggatttggataagcaagcgtaacttctaggaatgaatcatttggattaaacagtccattaagtacagaaacgggaaaatgagtgtcaaaataaatatatgcgcgtataactgggtgcatggttacgacataatagtttctttcctcgtcgatgtaccaccccatctctaacgcatcaaggaagataatgattgaggccatctaaaataaaacataaaacaaatctagtgagaaataaaaatttctcagtaggaaaaaactaagccaccgagcatgttagtacgttaataaataattaatatattcaaatgtagcaatgaaataattatgcaaactatatggatgcatgaaacgaattttcccagggtgcacatgacctctacatatcgtacagtatgtaactacacctcttactggatgtagacgctgtgatcgtcttatacaaacatgtatgatttctgtcatatatttgcacctggtcactacatatcatactgtatgtagtatcagattctgtttcacaaaatctcgtattggacttggaaacataaatcaatataacatcaatcaaaagtccatccataataaaatccataaaaaaatacataccattttatggaaaaatattgttatcataacatcatacatactacaagtatggttaaaccacaataccttattcaattaagatcattaccaacttaggcatgaccattgaatatccttaagctatagcaaaatcatgttagtaacctaactaataatccacaatatatctttcaaataattttcaacacctttaaactttcacaagaaaattataacctagcatgcattttaatctcctttcacctatcaccttactacttcatcctcaaaatttaatcactcaagcatttgaatcatttaactacatatcattcaacctctacttctagaaattaattcaaaataattccataataaaaatatacacaaacaacccaaatatcatcaaaatcaccttccaagatcattaaatggttttccatacattactaatatttcagcctatatatcatcacctatcctatggttaagatcaacattttctcatcataaaataaccttaaaatgacatgaatttcaattctaaatgataaccataaatttgcctaattaagcatatcaattaatccaaacaaatgcttaactagagatggaagcctagcctaccttagtttgagtttgaaatggaatagattaagggttgtcttccttggaatatcctctaagaaatgatgttttgaaaaataaaatggctgataggtgaagtggtacaaggtgtcacggtttggagcaagcaaaagaggtaaaaagaaaaagcttgtccagaagcaaataagtgaccttggagtgtattctagccagccagctatacgtgcaatatttttcaaatccctagctattaatacttctttaattagttaggttttaagtgatttagttgagttataactgaattaggatttagtttatttagaatttaactaggtaatcattaccttagaagatattatgcctaaaccttatcttgactttgatttttcttggtcaatatttttttaatccattgtcttgggcagctatatatacagaagctatttgggtgtggatagtttcggacagcttgagataaaataatttatgggcatgattcactacttagtttggtcccatattttagcacaacatagaggacatcctaagctttaaaataagtggtcaaacatcttgtttggttaagtatagagggagatatggaaatttcaaaacagtccaaaatttagcttacagccatacgaatactctcaagaatcaaatgataaataaacctaactttcacctaccttaaacaagtttgcttccaattcctccaagtatttggctgcaccttaaggtcttgaaagaatgaaaggcttgtctagtatttgatgctttggaaaggtgaagaaggcaatagaagtgaaggactatgatttctatatcaagaaggaagtgagaaagcaaagtgaagagagaaaatgcaattggccgtaagtttgaggggaatagcatggcttgtgcagaattttaattcaagggggtatttacagaaaacattttggttaggaaatagagaaattagttaggatgtaacttatttagtccttggtttggttctaaagtaactaagtaatcatgatctaaagatattttaattttatgcattaaatgcatgcttactaagaaagaagaaagattccttcattaaatggctatgcgaacgtggaatggagttttcaagaagccaaatccgatttttcctaagcttggttgcaaaattatcttttatacaaagttctagagcttacacgttaacctacacatggtttcacttgcatatagcttcaaatctcacgacttgcttggtcttatgtttttgtttgttttaatttatatctagtgtacttcatgtgtcttccaattcatatactagctaagtatgtgacatacatttaaaatcttaagcctttgcccaaaatcctacatagttaggattggtttcttttcttaaattaactaatcctaactaaatatattctaagcacttctaaacttgtcacttgaatccattagcttctatcatatccttcttgtatcatactaccatcacaggtgtttctcatgtgataatttttctcatcatattatcacatggtctaatactatagctcatgatagctttaaatattcatgaaattttctttcatttttactgtaatgtttatttacatgtatttattatattaggtagtaaaatttagagacttatcttctgatttacctaatcataaattatcggccagtctaggtattcctagttttcttatgatatttatctgttactaagggtaatttgttatcccaaggtatttctgtaatttcttcaaatctctacaaaatatctaaaacaaaatatctaagggtattttggtagtttgttactcacgtcatgggtattattgtaattttcactttaaaatatctaatcaaaatatccaaggcattttggcaatttgtcacttacttcaggggcatttttgtaatttttacttcaagggtaatatggtaattctcatatcaagggaaagggtaatatggttattctcctttaagcatttttgtaatttctcttttttttttatctctaactaacatatttaaatttttgggatgttacaattcactcctcttaaaaaaatttgcccttaaaatttactatattattctaaattgctaacaactctaaactaataatttaataccttattttctaccaaccaattcatacctatgtattcaaccaaccttatattcaatgatccaatagaaacttaaatcaacatacctacctcacctcttctatattattctaaatagttcattgctaacaattttatatcattttcatccaataaatgaaaatatattataatttctatatgtacctcatatattatgcttcttcaatattcataatgaacactcgtccagattgttgaggtcttccagattgttgggatccaacagtattttgttgattagtgtgtctacaatccttcagcatatggcccggtttcccacatccataacatactagttgacctttcagacaaggtctatccccatggtacctaccacacttgatacattctccacctcaaggattgaactgttctatctggttttgtcgcttaggaaactctctatctacccatatttctaactccgttgtcatgctaagtggccttccttttctgacccaccaaagctttctttataaaagtaaatttttcatcatatgattccactaatctagccttatttactaaagcagcaaagtttctaatttcaaacggtccgattgccctctggattctttcattaagtccaccttcaaatttacgcacttccactcctcatcgggatgcctttggaagtacatggagaacttagagagctcttcaaactttcctatatattcagaaacagtcatatctccttgttggagccgtaggaattctagttcctttgcattcttaacagtaacttgaaaatacttctcataaaatgaggtcttaaaagtattccagttaagaggaactctaaaggattctaatatttgcttagtgctattccaccaatattctatgtctgctaccaacatatatgtggcaaaggccactttctgttcctcagtacaatgaagaacagagaaaattttttctaaggcctttatccattcttcaaccttaacaggatcataaactcctctaaatttgggagtatttattttcatgaattcgccaaactttttgtatccattattaacctctactctaccttggttatttgcattttcaccagactgattacctatatttcttaataaactatccatcatcctattagctgcagctgattgatttctcatggcagatgtcatctcattaaaagttctcatcatatcagctaattcattggtagcttcagctcgtgacctacttcgcctattagaagccattagatcctgcttacacaaaacaaaatattgaggtgatcaggcttaatacagagctaagtgtggcagaaattaacaacatccataaccaggcttgtcatgctcatactacttttctataacttatcgttttagataagttcctactgcatgacattctaacctattcagagtatgctcggaagcataatcagtccattccccaggctcgcaaggatgaaccgctatgataccataactgtaacatccttccaattactatattatgcctaggtcataatacgtaactagaagatgttaacttttctaacataaaatttttaaccaaaatcgattgaaaaaaacttatctcaatattagaaatttacgcttatattgagcctgtagagacttttttgtctctttaataaattacaacttagtaataacttgtaaataatattccctacaataatagtaatgtccatatattacaaagcatataacaaaatactacaagtccgcaacattaaaagaaatcttccaacttgtcctcactttgtagctcctcctttcaatttacctgtctagaatgacacgagaacatactaaaacagtgagaattccaaagaattcccaataggtgaaaatttgcttatcatacagtgtcatcatcatcattccagttacttcggtttattaagaaaacatgtgaacaattatagttgatttttaatttcataaacatataacccgaagtagatacattttattcacaaacacttaaaaataatctcatacttcaccattaatgcaagcatcattttcaatcatgtcaatgcatagcgtacctttattattttactctttaataccctaaactagacaatgagctcattactggacttaagttgctcctgcagggtcgtgctcagctccactgtatcaccctttggggtcccatagggtcgtgctcagcttaactgtatcacccttgggtcaatatgtcttttccgcagggtcgtgctcggcttaactgtatcacccgttgggtaccatcagggtcatgctcagcttaactgtatcaccttcaggtattatctttctttagtctttccctcagggtcgtgctcgacttaaccgtatcaccctttgggcaccatcagggtcgtgctcgacttaattgtatcaccctttaggtcttatctttttatccttcttaatgcacatgacatgctcaatgacatgcaaagctacataactcatgttatacaattatgccacaaaacatcaagatttcatcatcacaaaagaaaatcataacaaagaacatcataaccacaagatttcttactacatatgattcggttcttcccataatctaaactcatctaaaagtcattaaaatcccatcttttagtatattaaactagacttcccaagatttctaaaaaggtatcacatgcctcaattggagttataaaactctagatataatattttataacttcaaatctgccagcaatctcaaaattccacactaacatctcctagtgttttgacgattgcaagcagtaaacaatctagtttcagctgaaatttttatatcttatagttgacatttagatctttaattccatatatcatacacctaatttgaataagaaataagagagaaataaatttatcaaaatggatggcagaagctatttgggagtggacagtttcagacagcttgagctaaaataattcctaggcatcattcactacttagtttggttaagtacagagggagatcctaagctttaaaatgagtggtcaaatatctcgtttggttaagtacagagggagatataaaattttaaagatagaccaaattcagctcaaagccattcgagcttcaataccaatactcaccaaaagcttattcctacacctaccttgatgttacttgaactatttcaatcatctcttgaagcaaagttgtatagaagatcttcaagaaagcaagatattaaactttcacatgccatccagcttaagactaagatataccaaaataccattcaaataatctcaagaatcaagtgataaataaacctaaactttcacctacctcaaacaagtttgtttccaattcctccaagtatttggctgcacctcaagttattgaaagaatgaaaggcttgtctagtatttgatgctttggaaaggtgaagaaggcaatagaagtgaaggactgtggtttctatatcaagaaggaagtgagaaagcaaagtgaagagagaaaatgcaattggcctgtaagtttgaggggaatagcatggcttgtgcagaattttaattcaagggggtatttatagaaaacattttggttaggaagtaaagaaattagttaggatgtaacttatttagtccttggtttggttctaaagtaactaagtaatcatgacctaaagatattttaattttatgcattaaatgcatgcttactaagcaagaagaaagattccttcattaaatggctatgcgaacgtggaatggagttttcaagaagccaaatccgatttttcctaagcttggttgcaaaattatcttttatacaaagttctagagcttacacgttaacctacacatggtttcacttgcatatagcttcaaatctcacgacttgcttggtcttatgtttttgtttgttttaatttatatctagtgtacttcatgtgtcttccaattcatatactagctaagtatgtgacatacatttaaaatcttaagcctttgcccaaaatcctacacagctaggattggtttcttttcttaaattaactaatcctaactaaatatattctaagcacttctaaacttgtcacttgaatccattagcttctatcatatccttcttgcatcatactaccgtcacaggtgtttctcatgtgataatttttctcatcatattatcacatggtctgaaactatagttcatgatagttttagatattcatgaaattttctttcatgtttactataatgtttatttacttgtatttattatattagatagtaaaatttagagacttatcttctgacttacctaatcataaattttcgacaaatgtaggtactcctagttttcttatgatatttatttgttactaagggtaatttgataatttgtcatcccagggtatttttgtaatttcctcaagtctctacagaatatctaagggtattttggtagtttgttactcaccttaggggtattattgcaatttctactttaaaatatctaaccaaaatatccaaggatattttggtaatttgtcacttacttcaggggcatttttgtaatttctacctcaagggtaatatggtaattctcatatcaagagaaagggtaatatggtcattctcctttaagcattttttgtcatttctctttttatctctaataacatatttaaatttttgggatgttacatcaggtctccatatttaggaacgaaaataactatttaccctattgtgttagttatattggatatttcgatgaatatgatataaaatagtagttctatgaaaaaaaagatcaaacttatatgagtaacctgttggtctaaatcaaactttcgtataaaataatgaccatgatattaaaaaaaaaaattgtgtatatgatccatttgctaagaatgctaccaagaaatttgaaattttcaaatgaagtacttttcttgtaagaagaaaaagaaaataaaaacagaagtgagccagaggaggtagtttgcctacaatttgggatgatcaaccgaagacataccgtgtatgtataaagaaaaaaaaatggaaacaaatgaaacaaaagagtagacgaaatgataagatgtgactactcttggagattgtttccctgggtagttttctttttttattaaaaaattattagagatttcctctcattagttgacatgtgtccccctaagaaggattccctcattagttttctttttttattaaaacactagtcggtaacccgtgcattctcaagggatgtaccgatttgttgtgctttgctccgcttcaaattgaaaaactattctataataagtaaacatataaatattttaaaaatgaagaaatgaatttataataggaataagaaattatgtttgttgtgtgtaatataaagatatgacaattataagtaaacacacgaatgaaaactctaatacttatttgtgtgtatcttttgtcttcgattgcgtctgttagcattccttttgcatgtgtaataaagaaaaattatttaataacaataggtatatagatgtagtgtaatataaatgtaggcacctgaggatgaatttgtaatgtagtactccttaacaattgtgttaatatcttacaaaattatagcctagaaatagaatattgtttataaatgtaattgataagtaacaacaatttcaaaaagattaaaaatttaaataatttgagtggaatatgactaatatatggttgattgagaacctattagaatttcaattcatataatcactataagataaagatataagattgatagaaaaaaatgaaaaaaatagcttgaaacaaaaatactaattttcaatctaagtaaaaattgtaatatgtagaaagcaacttttagttatgaacttaaattaaagaaaacaactgaaaactttaaacaaaattaatgttatgctagtaaacttcccacttgtttaagttttctctttcaatttacccaaataataccttcatttccttccatttgtcttgcattttttctctactctgaatcttcatcttctatttaatcatcaattggattacttttattcacttatgtttgtgtcaatgctcacttttataaagatcctgcatcaaatttcacaattaaacatttcattgatcatttacctgttcacctaaatttttgcaatagacatcagttttcatttactaactttttttaaacaaatataattgaactatttattatgaataagagtaatgttaacaaaagataagcaacaacaatcaaagattgtatgtaaaaaattcttactctataagataataccaaactgacggaatcaactgaaaagttcccatgtgaaaagtcgtcttaaaagtgtcataaatttagaagtaaaaatgagaaataagaaaacatatccaaaaatgtcattttgacatttgattaaacacataatttgcaaccaataaatcagtctaaaataaaatcaaataaatattttaaaaaaattctctaattctctcatctattctcgtaaagatatgtttaatatctttttccacaaaatactttaacccatagggtatatcaaataaacatttttaacaaatttagttcatattcataatattaaagaaattttgatgaaggagaaaaatcaaagaaagtaattaagtcaaaccaaaatcaaccaagaaaatagaaactaaaaaaattgttcacattttttgctacagatcactataaaccatgaaaaaattatgaagacgttgtagccacagtagctggcaaagatattttcaactaggattgtaatgttaaatggttaacagagaaataaaaagatatttcacttgtttacttttagaatagagagaaaataaattaaatgaatgaagaaggtaagagaaaagagaaaaatgatgagaaaacagagaacatcaaagaagaagaatgtttcaaaattcagaaaagaaaaaagatgataagaaagatatttaaacacacctagtcaattattaagtaaataagagatgaattactatatcacgagtggtttaaagttttttaaaaaaaaaattaaaactaatacgactaattaagtgttaaagagataacatatgagatgaaaggaatataattttttttatcaaaaaggaaatgcacttagcaagttctaatttgaaaatactggagtgcatttataaaaaagagtgtgcaattaacaagtttaatttgaaaatacttagatgcacttattaaaaatagggtacaattagtaaattaatattcaattactattttacctccatttttttgccaagtatcataagcataagatgtccaattttataatttttctagcagttaatttttatatatctatggtaaattattagagattccctcattatttgagatgtgctatagatgaagtagatccatttatacatgtaaatgggaaagtaacatctagacaagtatatataaaaatatcaagtgcaaaaaaatgaaggcattcaccgctgcaatcatacattaacaacctacaatggaaggctagttataatgtcacatagcatgagatcatcatcctagaaatactatggaagactaatcttatgccagaggaaagggttaaaaacatagcctataagtgaaagaagaaattactattgtatgataaggtagacagaaagcatggttaaaaaacagaaaaaaaaaaaaaaaaaaaaaaaagcctttaagctttcaatatattagcatctgtctatgaactagcatctcctttatttgaaccttggttgttagtgtctgtaggagaaggtcctgaacctaaaagcaaagggatctctttcttttctgggtctttctttgaagatggattcgcagtcgaagatctaagaggaggctcaaaatatttgctagcaacatctggagggggtaagtcctctcccggaagcactagaagacctttctctcgaagagaagacggctcgttgaagcaagtgctccacagggagtccacaagttgcctctcctccctgactacaccaaggtcctcagctgacattaaactgatgttgtttattcgttcttgaagaagttgctttattttctcactgttttcctcgttgccatccttgccatctttcgtattgcgagcaagctcgagaaggccacgaagggctgcttctctcacatctgaatcttcacttgaggcaaggtgcatcaacattcgaggaaacccaagctcgttcacgatgttgcagtctgaaatattctcatgcaacaggtaatggatcaagttgagagctttcctgaaatatttaaaaaaataacaaaagttggaattcaatttcccatttaataatgagggttgaaaagtctaaatgtctaaccaatcaaataagtatatatatccgttataattaaaccataaaccaataatgaggatataatatggtacaaactactcctaattgatgatatattcagagggaataacacaattaaaaacttcagagaaaaccttaattacctttgaaatctcacattttcagaggcaagagcatctttcaaagcagcatacccatttgccaaacgaaatgcagaaatgcctggtttgttgtgccgaattagtgctgtcaagttgttcacaaaagaaaaatcagtaccattccattctcaggtacatcacaactccaaaatataataatacatacaagatattgcaccgagtgctttagttctaacagtcacgtcaggatctgaactgaaattagaaacaagaggttcaaagccatttgcttccataacaagttgctgacttcgaggattattctggactattgtggccacaacatcagcagcctttgctcgaatattggcatgagaattctttaggtaaccaagaagaggaaccaaaccaccaattgagtggagatctgggaataggtaatgccaagaaataggtgagacatataggtattgaaacatagaaaacacaaatccattaaccagcctattatcaataccacagacgctaaagcatatgcaaacaggaaaaatgtacagactaacagcagaaaaatcatatttcgacaatgtgaactattgccatgatcacatggaaataatttaacaaatttagggaagttatgagtcaacaattctcagaaaaagcatgacaataataaaacatcttgaccacaaagctctacacataaacttattacattgatttatgtaaatttcaaaacaagtgattgttgttatttaacattggcccttgcattgcccatgaagacacttcatcatccagcaaatatcactgagacagcaactaaaaatccaaatgataaattaaatcacaatctacaaaaacttgtaggaattccccgtaggaaactaccataaacaagcttaagcatgacaactaagtacttcaataacataaatagtgttcatattatcatcaacaaagtcaaattcataagccttcaaaatccttaaaactcaccattggccatgtccatcgactcaacatgctcttgcaactcttccaacatatctgcaaaaaattaagttagcacaagattaacaaaaccaaacattaacttaaaataaaagggagtttatttttcattagtcttgcaaattgataaatgttgcataccttcaatgtctgcaggggtaactccttggtctttcaatacttgttcaggagtttgcatcacaagtgtgatctctttaatacgttttacaacatcaatggtctgtgcttgcatcgcttccataaaccatttttgatcctcctcactacaaaatcacagaatcaaaaccaagtccactatatcaatatcagcctccatattcatatatagcatctttttcaataacaattaaattttcaaaaaaaatatccacgggaatcaagcgtaagtaccaagaaatttacaacaactcacacacactactcaacggactaaactagaccaaccccttttggtattaaattttcaatttttcacaaaatgggtatacaattttgcaacaaaaactacaaaaaaaaaaaaaaaaaaacccttatatatatatatatatattgtttaactacaaaattataaaattaacaaaaatcaaatcagtccaatgaatattattctcaaccctcccgactcatttaactacaagacacctttttattttcaaaaacattatatttttgctaatgagtacacgtcataaactaccatcccaaagaaaagaaactataaaatttacatacgaaccatatttcccactcgaagaataaaacaattacaaaaccacaaatcccaaaatcacaccctagtccactaatcagtaaccccacctccctcaatcacatttaattatatcaaaaaatgacatacttttccattcaaaaatcaaattttgaaacatgggtatgcgtttcccagcaacaaaaactaaaaaaaacgaggaatttccatagtttgttaacctgaaccatcataaagagggctaacacaacttcaactcaaaacaattcacagaagaaggaaaaaaaattgaaaatttggaccttaaattgcgagtgggtctagtcccatcggaatgagcaatgctccatttgagcaacccgtcccagttgggtccttctttggccattcgaatgattagagagaaaacacaaaacaaaaacaaccttcttctacggtttttgtaagaggtctcaggaatggaaagtgaagggattttagatattatatagtttcagcaacgtgtgttgtgaagattcgggaaacgtctcaagaattcaagagggttgtggaaacgaggaaaagggcaaaaaaagaggaaaggaatcgtcaaaatttgggttctgtgtgttttttggggggttgggttggaaggctgtgatgtgatgatgggccttgctatggatattgaatggcctgggccattatattttagtcttcaaaaattgtaatattggcattaacttcttacacctgtaggatttctaagacacccagcatttttttaaaattctgataatactccttgttgatttttaacatacaccagccacttttcatgctttttgttcgttcctttttgttggttcatcttcacacgctgttcgtggttagttggtggcgcttggttgtgacttcgttgggattgcggacgtggtggttagcagtgatggaggtttcgttggccgctacgtcgtcggaggtacgttcttcagcggtttgattggaaatccgtaatgatcgtacagattagcaatccgtaaggttcctacggattgccaatccgtaaggctcatacggattgccaatccgtatcacctttacagattgctaatccgtatgagtcttacgaattgtcaatctgtatgatccttacggattgccaatctgtatgggatttttttttcaaatttttttattttaaatatgttaaaagtattattaattaatttatttttcctattttcatttaaaaatatattgtgaagttaatatccgtaaagctactacgtttgacagtttcttaatacggatccttaatcagtacaatacacaccttacggattacaaatccgtacgcaagcctaacgaaatacgaaacgacaatgtcacttacctcgtcgccggaaaactccaacaccttcgtcgcctaccagcagaagccgtcgtccagagcccgagagaggagaacgacgagcctgaaccaaaatcgccacaaggaaacggagagcacaacgagcggagaaaaagcagaatcgattcgaatgctgctgggtgtattagaatttgaaaaatagcttttcttttattattttaggcaaggctatttgtggtaattcacaaatagttgttgggtgtattagaaactcaacgggtgtaggaagctaacgcctatattttttagtcttcatattttgaaaaacagacattttttagtctctcagggatacagattagatcttatattttatcttttatctatcaggggcttatttagctcttaggatgtttttttttttttttcaattttagtccttaaaatatgataaagatagaatcttatcatgttcatttagtatatttattttattaaaaaagataacaggattaataagacaatttttctatatataaggaggaactgatttattaagattaactcttcagtattatcattcattttattgaaatcttataattgtaataagtaattaattttaatcattaaattttaagaaaattaatggttaggattaagagttactcttttaaagttagtcttgaaataagttgatatctcctctatatagaatataattcatttacatcaagtgtaacaattaattattaaggcttacactaaatattatccattgatttaattaaatctgacaagataaaatttttccaatttaaatatatattgtgacacataaacttaaatatatatatataattaattgaaaaaataaaaattaacaaaatataatttagttaaaattatattttttataaaattatatgtaattttaatgaaacaataattttgttatttaaatataacttatgttatatactattattttttggtttgttatcctatggatatcaaatattgcataggattagatatgtcatactattatcctatcaagttcttatattgctctcatattctattataccttggccaacaaacaagtccatataatattagatttgctagaaataatgacaggttgaatcataaattaagaggggagtgaattggtttcaaaatttttttttatctcaaatgatttttttttttgcaaatatttaatccaattaatctaggagattaagtgtgttacaaatgctctttgatttcttaaacacaatcaaatacttacccaatgataaatgaaaactattcaaagctcaaaggataagaaacttatgcaagaaacaatataagattttaaaggttagagaaaagatgcccacatgatttatattggttcaatttcaaagaaagatccaagtaacccatttaaatatttttactataaccttttaagttacaaacaaactcacaagcaaatgcgcactacaaatgcctaaaaactcttgaaaacctatcaaaaactgaaccccacatgtagaaaacccatcgcatgcaacccattgagaaacctactcaatgaaaatgaaaaatagaatcacaataaggaaatatttcacctgatctatgaaagatttgaaatacttgctatgtagtctcaaaactactatttgttctgttcgtggtgaacagaaatgtccaacaagtattgttgggtaattaatatgggatcaaactctctctctgagaatgcttatggtgaaacaaacacctcagggaagatcacaatgaacacgaaaccacaattggacgtggggtgtgtgctctgtgtgaatagaaaagagagagttagaatgtgtgtacttttcaccatagaggatattctattttataggatactgaccttgagaagttgctaacaaaatttaccaagatttctggaagatttgttgatcatggcttaggaacggttaccaccacttactcactattagaagaattcaacgaagtagtctgacttagtcatattgggcctactaaaatggcccatcccaattatctgtaacagttgccccccagctcggttatccaattagcttgtatgatcgaggtggtatattggaaagcggattttcctttacgtttggtccgaggtaagcatctcggttatatttcgtccgatattatcaactcggtttgatcggcctcctagatctaaatcacatcatcaatcttgattagatcacccgtccccgggctcgtcttttctttctgatgtaatcgacctattcctggctaagaacctagggacgcgaagcgttccaactgctacccaattatacgaaacgacatgtctttcaacgatttaatgccttgtcctttctttttgcactttaaccatgagcgtttcacattgttcccatcttgcccccatcttttcatttgctttgacaattctgcccctctatgacgaatcatgtgtgacggttactcatttcaaacgcttcattttctggcggttactcccccttttcaatatacatattcttcctttcttccttcatttacttttgactctcatattgtgcccttcttcttcgtgccttctccgctattcgacaatcgctctccttactcagtttggtgcttcaagtttttcccccagatttctcccaatccaggtgccttatgttccttctcacatttgtattttagaattttgcacttttatttctcattgtgactgcatttttattttggtttctctgtattttccccttttcattctatttcgaaccttcatctgtgcttcgttcttccttcttcatctttgtcttccgaaccttcgtctgtgcttcgttcttccttcatcttttttttccttccagtatttgtctgtctctttgatttatcttacatatccaatcccaaacttattaaagatgggctttactcctgaagaggaagcacatattagtaaaacggttcccccccgttctgcattttggttttttggtctctctattccagaagaagaaaaagccaaaaatgtattacatattccttctgggggcttcaatccctcaaaaaggtctttgaccaaaaaacctatcccttcgaaggttacggtagaaccaggtgttgtacctagtaccgtgcttaggggtcgttcttcaatcccttatggtattcctatggtttcacctgtcacaagaatttcgacactcccaaatccgcgttctatggggccgccccctggaacccggtttgagctgtgtccagcatgtctggatacattcttatacttggctggaaaatgttttgacaaacaagccaatgataccctagacgcatgtcgtcataatctggttgtcgttccccctctcgcaactgcaaagcccggagtgtcgacatcgttccctaaatctggacacggggtcgagctgcagacctcgtgcatagctggtcctgtgttagctaatactccgtcccgacgtgttgccacggctccaggtactttactgatttctggctttttgttttgtcgtaggtcattatggaggttccatcagtggaaatagtcgaggaatcttggtcgactagatcccaagccgacaacccttcttctctcctaatctctcaattcccttaggttacctacgaggttctaaacacctcctctgacatgagcccggagagtgtagcagcactcccaattgggaatcaagaagggttctcaatccgccaccaccctgaccctcacgagcccatctgttcgtgtgccggggagcgtgagcctagctttttctttttctgcgcggatgtggttacccgcttgggtatccgctttcccttgtccgagttcgagatgaaacttcttaaacacttgtgcctaaccccttcccaacttcaccctaatagctgggctttcgtaaagtccttccaggagctgtgtgtaaacctaggtgttccctgtaccgttcctgttcttctatattatttctctgtccacactggccggaccggccaagaacccctaaccggaaaggatggacttcttcgaagagtcgtcccaatcgcaagttgctttccctttacaccgattcttttaagaattttaaaaacaattatttcaaagtttgtgccgaacccgacaaacaaccatttttcttacttgggcccgagtctcccggggtaaaatggaaattccctctctattggacccgtgcccaccatgaatcccctcctgccttttaccaatatgaggagacgggcttgtcggacacggatgctcatatagtgattcaaattgacgcttttctagaagcccgcggtctctgtaaagttgcgcgtccacgttagttcgaagcttcgacttggtatgttttatcatctcattgtagtaatttaactgtttctctttatttgtagccgttactatggaggatcagacggggaacttgagacctcgatcccgaaagacaaccggtacctgcaaataggccaagccggctactgcaggccccaaccttcaattcctttctcaactcaagaagaagaaggtttcagaaactgttcacgaggaaccccccacagccgtggtcacggttgaattcgtgccacccctcgcattagtggtctcagttgaagacgtgacggcccctgttgcagatctcgcgtgccgccgtcacctatcgcggcccctactgttaccccaatggatggagaccctcagttggcatgtcccaaggctaaattgaccccggggtatctctgggagaagggaaccaaggacctcttcccttatgtctgggctccgaggcacttctctgatgcaaccactttttccaaggagcaaatgcacaagctcggtcagctgcagctctacacccactggaccacttctcttgtagatagcctagtgactttgaagactagatatctgaagaagaaggacgagctggatgctgcccaggctgagtctcaaaaaaccaaagaggagttgcaggacgtgctcgggaggatcgagatgcttgagcatcaactccgagaagttcatgatgaacttgaacgagctttggccaaggttgccttcatgacagaaaatatgaatgaagtgaagacctcattggaggtggccgaagctgaagctaaagaaaataaggaaaaatttttggactcagagaaggaggttgccgactttcgggttaaatttttgaacttggagaaataggccaccgacttaagggatatgatggcgtccgtggcagaggaatccttcaagaattccttggtccaagtccaatgtcttaatgccggaatcactttgaaagtcaacggggtgcattactaatcctgtgttcgggatggtggggttgttccctaggacgaacaggattccgttgccgtgactgaggaggtttctgaggccagcatggaagctatctcggcacccagaaatgctgaagtttgaagggctgggatgtcgatttcaggttgtaatttttaattttagtggtccgggctacggccggccttttctgtacaatctttgcactcatacaatatctttttataatatcgcttattactatttcgtatgcacatcgtatattcgtttggctccaacggccaagtatgttattgttcgaattatatttcagtatttgatttttgattccgcctcgagcaatacttggtgcaacgcggccactatggaccgcgccaacttgatcagggtttggtagcacttcgtaattacttgagactatatatgtactgtatatatggggaatattccttcaacgggaaattttattcataaatattaaaattgataacaatgttatttgtattcatgatcccgatgaaagattggtatgggagtgccgaggaacttcggctctcattcctctcaattaacgggaaacacatgaatgatacataaaaacttgaacgaatatcaaataaatcttcgtggcattaggaaaacacaggacttcacaactttagttgtagtatactttcagcttgtcggcattccacgtccactttattgcttttttatcaagagtctccaatacgtaggcgccttggccaaggctctgggttattctatatggtccttcccaattagctaccagcttcccatcccgggcgtttttattgctgatgtcggccctgcgtaaaaccagatcgccttcgttgaagctcttaggcctgaccttgctgttaaatttcgcggcaacaagccgtttagtggccacgtctcggaagtgcgccttagttcgagtttctccaatcaatctgagctcgtccaacaatgccctgttgttcgcatcctcgccttctctgagtacagacatccttctccaggagggttacccgatctccattggtatcatcgccttgcatccatagatcattcgaaaagaggtttcttgggtggatgtgtgtgctgtggttcggagtgcccttggaaccaaaggaggacagcggctgcccaggtactgtaattgtcggaaccactcaacttctcgtaaggaatcagcggaacgttagtaaaagtgaccatagagccggtatctccaagggaaccagtagaggccatgaagaatagacccaaacagggctggaacaaggtcgccggagagagagaggcaggggggagggtcgccggaagatgggtttgccggagggaggctcacgcgccgatttggtgcaggcacataagtttcacgcgccgggaaggaggtggcgcttgggggtgcgtgcggaggtcggaggtggcgcggcttggtgagctgggtcgccggaggggggcgatcctacccctggaggtcactgtaacaccccaaaattttgggaaattacagtcaacttctaaagtaaaatgttaatgagaggcagtagaaatttttttggcaaaaggacgaaaatgcccctagctattttgaaaatgaccaaaataccctttaccttaaaaacggccagacaattttgggaatcctgtaggaacctaaggaaaggataatatacccttagatgataaattatcaacaaagtagatgacaagaaaccatgaaatagaatttttaggaattttaatagaaattttgaaaagaactcaatacagactaatcaaagcatctgaaaaacacagaaatatggtagatacaatctataggattttctcttaaatatgagataaataaatttccttaataagttgatttgataattttaaaaattggaagcaaattggaccaataggaaaataggaataagtgttacatgtcataaaaagaaaaattgtgtaaatttggctttaaggatgagtgttggccgtgcaaactaaaaaccgaggaaatgctttagaaaagtcttagaaaagtcaagcatgaccacttgaaggattgaaaagtctaagtttaatttgattggtccatgaaaaggtgtaataaatgcttagaatcttgtaagatacaaaagtttaacaaaaggccaaaaggaaatgtctacacaatatgaatggcacgtaaagatcaagctaaaagccaaggaaaggtgtagaaaatttttgaaacaagccacttggaataatacaattagctagccaatcaaatggaacctagtgaaaagttagtaatggtggcttaagaagattttttctaagaaaaacttcctcttgactcctttggacacggaggaaattctacgcattatttcaaagatcccaacggtccaaagttagatatatgggataggagtatacctttaaaattgtaaggagatccaacggttaatgaattcagaacaactattttagtaatatgggttttggagaaaagtcaagaatgaagaaaagcacaaagtatctttaaaacctaggtatgccacgaaattgatagaaattgctctccaagcaatgaggagtgaagaatcttcaagacttggacacttggatggacaatattcactagccaatgaaaagaaagcaagtagaaagggaaacattaaatgctttaagatattttacaactccaaatctactaaaatcaagtaactaccgtatgaaccaagctaaatggaattgtctacaaaatgaattggcacgtgaagaaaaggaaagagcaaggggctggtagaaagttcatgaacatgtacacttggaggcaaataattgcttggccaatgaaatgaaagcacatgtaaagaaacattaatggctaagtaagattctttgttgatttttcttaaaagcaaagctaatctccttctataaaagagtaggaccgtgaggataggggaggaagggagtggaatgtgcagccttaacctttatcactttcaaagtaaaattaaaacactttcaaagccaataaggaagtaaccgtgccatacttcctttgtattcttcttcccttgatttttctctcattttcaagaaatacctcttatttaaacaagaaaaccaagacctccaattctagtaatctcacgtggggatcaaggaaaaggaaggaggagctgtccaaatttaggaaaggtatgggaagttcttgagaaacaaagtttaaatattggttatgataaaattaatgcttgaaatttaatccttacttctatgtgtggtaacttggtttaaaaagcttaagattatggcatgaatgggtatgaagttaagtaaattgattttaagattataagtaattaaataacttaaatctaaatggaggataagtaatttaaattataagtagtagagctatttttagaaaataattaatttggttttaaactaataaataattgatgaatttaacttggttggagaatgtttaggaggattaaatctttgagtattaagatttattcaaataaataagtcatttgaaagaaagtattatatgatgaacgttttactaaagtgatgtttttatttaatgttctataaattcttaaaatacctgtattaaattttatatgttgttatgatctatttgttgtaatcttatttattatgattatgtgaaactcattaattaatgttgagctttgatgaattatgacgtatgatgattgttctgagaaacgtatgaattagactgtggttgatgtatgatttataaaattttacgtgatgaatggaacgaagttgtacatatcgaataatcattatcgatgtgcctttgaatatgatgattttgggtttataaagaggctaaaagaagaataatattgataatgatatgaggaaatgattattcatgcatgtttcattcatctgcatatgccctacgagggttaagccgcattgccctgcgggggttaagctgcgatgttgacctcaagaggaggtgtcagatagctgaggattgagacgagcgtttagacaaaaggtgtctaagctggggggtagacacagtggggagatcacctacccatgatgatcacatgttgtgtaggtgtgagtccttttgcaacactgacctaccctgactggtcgatccaatctgtgccactgagatggggctatcttgactatggccatgagttgaaagttgatggatcatgtatcatgcattttcatgcaatttctatgataaatgatatgttggttttgtaaaattatcctgatatttaaactctgtttatctggaacttaccctatttgtgtctgtggttgacacctgtgatgaccccaatacatttaggcgagcagaggaacaataatatggggatgacgtcgaagaagatatgatgaagaagatggatgagctgtgtgtatgattgtgattttctgttttctgtattttgaagtggactgtctgtataatattttgggacaatatattttggactgtaagaggactgttatatttaactatatttggatcagatgtgtgatgaactaatgaacgtagtaggattaattaactcgcttagaatgttattctatgtacacttggaatattatttttacgtaaacgaaaacgaattatttaagagaaaaaaaaatatttcgtaagataagtaaagtaaagaattaagttaagtaaaagttaggcgttacagtcaccgacagaaaaggcagcccagtgagagggaaatcgcgttcgcagtgctcgcggtactgttcatgggcgagtactgttcatgcatgggtaaaaaccctaaaaatttgaaacctaaactactgataccatgtagagatgttacaaaaatgatgtgtgtaaattccgcacatcagttgctttatttataatcaaggagccattacaaaaggaggaaacaaaggtaattaaatccctaaaaatcagctagagagatatttcctagtttccctatttacattaaatcagattatatcattaacaatagtataattgttccacccaattactcccggccttgtgcattcgcttcctaagtccatccaagatcaccttattagctgcctcggcctgtccattcaattgtgggtgttctacggaagagaaatgatgtttgatgtggaagtcggacatcatttttcctacccgcttatcagtaaattgggttccattatccgcgacaatttcggccgggatcccgaatctagagatgatattcctttcgaagaacttttggacttgggccgaggtaatggtggccaactgatagagtgcttttagttgagtatttttctatccttcttagcttatttgacctctcttggacctttattttcctattctaattcagtttttggcctaggcaagtaagtgggcttaattgctaattgttgtgtattttcggatttttgctcacttgacgtatctaacttgtgcaggacctatagggtgctaccaatctccgaatggagcgttctaggattccctggaaagataacgaaaagatctacaagtttgctacaaatagctcgaggccaattctgtcatttagagggtcattttaagcttataagttagcacctctgcacttataattttgggctgcgaatttgactttcatggttgtaaatagcaaataattagattgttgggtttgtttgtggcccattttatttttagaactcagtcactacatatattagtgactttagtgaaacttggagcacacttttcattttaataaaaaaagagttttgcatttccttttcttaagtttttaggatcaaaatccttgctctcattttctctctactgttcttccttgttcttcatttttgttttgctgtgcttccatttttgtgtaaccatttcatggggctttcactgatgatgatcatggaaggctaaatcctcaatcaatccaagaatccaacccaagcacaaggagaatttgagttctggtttagtatttcgaattctatttgaatgtccatcttcttcttcaattgctattctgttttcatgattatgaatgtgtttaggattgaaaacggattaggttatggattcatttcctaatttctaatattaatcacagattaattggatgatatttcagttagggttgtggtttcaatcaatttaggggttaagtcgattgagttgcttctaatgagattgaatgaactttcatgataggattaatttctgagaacaatgatgattcgaatttcttggtgaggtgaattggattgatgttttaaattctgttttacattacttcttttgaattctgttagtttctgtgttgctctttaattttagtttatgtttttgcaagttttacttacgcacacaaactgtttgataaaattccccccttactgttaccattgaattgaagttagaaccatattgattgtgtctctaagtcgacctaggttatctctgtgctacagaattagcttagttaaattgttttggtgcgtctcgacaacgtgatatctcaaactggcgctgttgccggggacacggttcattgtgtgctagctttaatttgctgtaaatagttcatagtagtagttatatatatatatataatatttgcatacattcactgcatattaacattctattgcataattgcactttgtcacatttgcgttattgctgcagtgcattatgaagtatgaatgatgtagtttatgtgtgctgtaaaaaaaaacagagaaaacagtgaaaaaacagagtagtagtagggagaaagtagtatagtgtagttgtttttgtagtgtcattttgctgtcccaaaatttttccaacttgtgcagtttgacttgcaatttgtttcccaaggtttatcccccattttaaacaaaagcaacccctttaagggttaggtgtgggttcaaattggcaaattcaaactctaagtaggagttttggacaagtttttataattggcgtaggggcattctggtaatttcacagcagactatctcagaattggctgaaattttaccagaaggtgcagaaaattcatacatcaagttgaacttgttatgaagtaacatgtttagcaggggtccaaatcgccaaattccatcgtttagaccattttttaggcaattttctaatttcatgatttttaaaaatcaccaaaaaatcacaaaaatcaatcatgattttagacattcaatgttacttttttagattttttcaaaaaattttagggcaattttccaatttctatttcatttcagcatatatagttggtagtgtcctggtagcatagttgtttgatatttctgtgctgtctgtgtttattgttccttatgagttgaactgtgtatgactaggtccacatcaagtgaattacattcatttgatcctgagatagataagacatttcatagattaaacagacataaccttaggttagatgacttagatgactttgatagtatagttttagacagtagtgtagtatcttctgactttgactctgaatctgcttctactccttctacttctacacatcttgatatcatggatgataacaacctaactcttaaggagttaggtacaccagatgttgtttaccaaccttggtgtattcaataccctgagactgaggtcagttatgagctgaaatctggcctgatccatttgctccctaagtttcatggacttgctggtgaagatccacataaacaccttaaggagtttcatttggtgtgttccaccatgcgaccacatgatgttcatgaggattatgttaagatgaaggcattccctttctctttggatggtgttgctaaggattggttgtaccttcaaccaaattctatcaccacttggactgacatgaagagaagatatttggagaaattcttccctgcctctagaacagcatccatccggaaggaaatttgtggcataaggcaatttcctggagagtctttatataagtattgggagagattcaacaagctgtgtgctacctgtcctcaccatcaaatcagtgagcaattactaattcagtacttttatgaaggattaatgttgatggataggagtatgatagatgcagctagtggaggcgctctgatggacaagacccctcttgctgcaaggcaattgatttctaacatggcagccaactatcaacaatttggtgctagagttacaacaactaaggtgatggctgcaaatgaagcttctgtctctatggttgctgataaccagagattagagaacaaattgactgagttaacatcccttgtgaggtagcttgctattgggcaacaacagaatgtgatggcagccaatcaaccaaggctttgtggtatctgttgtgcccctgatcatcccacggatgcatgccccactcttcaagagacaaaacaacctgctgaagtttcttccatgcaacctgaccagtcattcagacctcaacagcaatataatccttactccaacacttataatcttggttggagagatcatccaaatttgaggtatggtcctggtccacaacaacagcagccctttagacctccacaacagcctttccagcctgccaatactaaataccaacctcctcctttcagacaacagccacagttccagcaacctgcacctacacctgcacaacctgtgcaggccagctctggaccttctttggaggatttaatgaagcaaatggccagcagtaatatccagtttcaacaaaatgtcagtgccaccattcaggacctgcagacttagattagacagttagctacaactgtcaaccaaatggagcagcaaggttctggtaaccttccaatacaaccagttgttaatccaaagaatgtgagtgccattaccttgaggagtggcacggaacttccagatgctggtgctagtaaaaaagttgataatggttgatatgctcttagcacatcttagtttttagggttaatttagttataattcaatcaataattagcaatatatgttagaattaggtaagtttatttatttgtttgtttttatctcattttattactattttatttcagagtcaaaaagaaggaaagaagtataacaaagaaagatatgtcacaaaaataaaactgcagaaggttttggttaccctaattaactatatggacatgaaattataaatagggacttaggaggccaacagaaagacacacagaaatacagacagaaacacagtggagagaagatcaagaccagagattgaataggattaatgcttctactctctttgtattctttgaggttagacatgaatatgtctggctaattttctttattgtggttagggccaagaaccaatgtgaactcctctgtaatttgattggtattaatatgagattattatgattgctttgttttactctgttcttcattgttatattctttcttagaattggccattctatttaagttctgagagttagggttcgcaatagggatgttgggattctaatttctgacatgagtaaaataacagtttttacattgcctagggatatggatgtatgattgcagaactttatgatatattcttttaaatgcttagcttgataagaatcactaaggaattaggatttttgatcgggttaaagggttaaattgctaaggaattaggatttaactaaatttggaaagacatatcctctgagtaatcagaagtaattgaaattgataaccaatcaagtgaaagaggtagggatcaaaggggattgtgttcttactacaattatttctctcaactgcattacaatcaattcaaatttacttttaaattcttgttaatttctgtcatttaattcacttaattccaaaatacaatacaacattacttttcaaacatattgttttcttccaatctctcagatcgtgagttacgataaaattaggatcaatccctacggatacgatactctagttactcactctattacttgaaatgaacggtgcacttgtcgtttcgcgacaagtttttggcgccgttgccggggattgaattaactaattttagaataactttaatctttgtgattggaaacccttttgttactaatctgctttctgagttatatgcgaggtatagttaatcctgataatctacagtacgatcctgaaatagaaaagactgctaggaggaacaggaaactagccaaacaaggaagaagagaagcagaaaattttgattttgattcaattcctgaatcagaattagaattagaaatggctgacagagcaaataatcagccaagaccggaagatgaactgatggaggatattctggctctagtattcactagaccaaaccctagcattgtcagaccaccaattcaagccaataattttgaaattcatccgtcattgattacattggtggaacacagtcagtttggtggggaagatgatgaagacatgacttcattgacagatttctgagaatttgtgataccatcagacatcaaggggtgtcagatgatgctattagattgagattattcccttttgctgttaagggaaaagcactcaaatggttagatagacaaagctcaaatagcatcaccacttgggaagaattagttgcaaaatttttctcccaatacttttctatggagaagtataataggttggtgaatgaaatcaccaatttcactcagaatggaagagagactctatgcgcagcttggaacaagtttcaagagctgattaggaggtgtccacaatatgacatgcctgtgggtaagcaggtacgtattttctttaatggtatgactcctgaatcacgaatgattgttaatgttacagttggtggttcaataagatcgaagatagcagctcagacttataagctgataaattctctagcccgtaatgaaaatgaaagcattacggttcagccaaaaagagaacttatccaattgggcagcagtgatgccatgctggtagagcagaaaatattggcccagcagctggccaaattaactgaaaagatagacaaacttcaagtctttgcagctcaagtctcatccagcataatgccacctgttagctgtgagtattgcctaggtgagcacgaatctaatgaatgtcctatattggtaggagctgacccagtgcaggtgaatggcgtgtggaacgatcagagaccccaacagaattaccagagaaatcaaaactatgctatgggaaataattatcaaagcagaattcagggaggaggtttagattacaagtctaatcattatctacaacctccatctattccacctcaagagccacctgaattagagaaagccttgttgcaattaacaaagattaccaatgatcatatccagaccacatgcattcatcaatgagattagagctcatcatagaaatcaagatgcttccatccggaatcttgagaaccaaattggtcaattggcaaagcaaatatctgaaaggcctcaagggcagttccctagtgacaccatagtaaatccaaaggaacatgtcaatgcaatcactactaggagtggaaaggtaatcacccctcaggaaaagcctaaggtaagcaataaagaagatgaggaggagaatatcacggttgctgcagaaatagaggtagaagaatcttcaaataaagaaagagaagaaattttttttgcacctccaaagaaacaatgggatttctctagctttgagaaacctccctatccagtgcagtccaaccaacagattcaaaagcaacagtttgccaggtttttagacatgtttaagaaattacacattaatattccatttgctgaagcattagctaacatgcctaattatgcaaaatttatgaaagaactgttgtctagaaaacataaactgcaggactgtgaaactattgcacttactgaagagtgcattgctatcatatagaggaagcttccacaaaagctaaaagacccaggaagcttcaatatccctattgcaatagggaatattaatgtgggaagagcattatgtgaccttggggcaagcataaatttaatgccattatcagtttgtaagtcccttggtatttctgaattgaaacccaccagagtttctctacaacttgcagatcgctcactgagaaagcctacaggagtcattgaagatgttttggttaaagttgataaatttatttttcctgcagactttatagtcttagatatggatggtgaaagtgaaatacctcttcttttaggtagatcatttttagctacaactagggctttaattgatgtagagcagggcaaattagaacttaggatggataatgaatctgttgtttttaatgtttttgatactatgaaaaatccatctgacaaacatgattgttctaggctagatgttctggataatgtaatttgtgcaggtcaaacagaggaagaaaaacttaaagaggagctggaaattcaaagccaagagaccatacaagaagctactgagatagtaatggaggtgcttgagaagaaagaagatgatattccaattggagcaccaaaggttgagctgaaaaggattctagaaaagactgtgggaacatctaagaaggattgggccaaaaagcttgatgatgcacattaggcatattagactgcaggcaaaacacctgtagctgcaggtgagaatgctaggacctataaggagaagaccaagaagtggcataacaataaaattcaccaaaaagaatttgagccgggacaacaggtattgctctccaaatttcgcctgaagttttttccaggtaagttaaaactctgttgatcttgtccattcttggtgcaaaagatttgtccttatggaatagtagaaatctctcctttagacaatggcaggtcttttaaagttaacagatgtcggctgaagctttacattggaggccaagtggataggaatacagtttccttccactaaattcatttgatgattaacagaaaggtgcatcaggctcgcgacgttaaacaagcgctacttggaaggcaatccaagagtctgaagttattgtttttaatttgacatgcaatgagatatgaatggatttaaatctgggaattaccaagtctagtaccatattagttttgcatttcaatatttagtggatgcttttcttagtttcaggatgaacagattgagaaagacaagaagaaaagtactgctgcatcttgcagcaaagtgacagaccaggaccatttatttttgttttaattttattgttcttgtttttaattttcagtatctttacattacttttaggttagttgaatgcttgatgaatttaggttagttgttttattattaaattgtttttaagtgtgttctgtttggattaatgttttgttctgattgtgatttctcaaataatgcatacgtgattgagtatttagtagcgcataatcctttttagttattgctggggacaacaattttctaaatctgggaatgggtgcatatgcattatttgaagaatcacattcaagaagcaaaggatgtctaacagaattttttttttaagttttagtagttttaaattttagtcattagttttaaatttttagttaattgtttcaatgaaggttagaagtatatcttatttatctcagaattagaattgtggaatcagtgatgaattggatgtctctgttaggaagcatgagtgaaatgaaatatggcatagattgcatgaaacatgattggaattgtgattgttggtatattgatgctcatattgaagtaggaaatgatgcttgatatgaaattaacagagtccagcttgagactgtagcctgtgaggattgagcccatacataattatttttctaagagaggcctcactttgatagtactctagaacttgctctatttctctgatgcatgtatattctgatatgattaaggcagtttattcttttaaaccagggccaaattgacttaccttcaatttttccattgctaccccctttgagcctaagccttttcattcatatacctaacatttagaccatataccttgactaccctacttaagattggaagaagaaagaattagaactaagaccactagatattgaaaaatagcaaagttaaatgtccatagaaagttaagaagaagtaagaggaaagacaaagatacccaagaagacaatagtttaatggaaaataatcagtctgatattccaattgctttgtaaaaaaaaatggtgtttatgataatatttatagatgtggacaaggggacatgagaatgaaataattgatattgtgtttaagtggacttgggaaattctatctaaatccaatcttaaccagctactatccaaaacattcatacccttaagccaggccaagttacaatcctataaagaccttttgatcagttgtgcatgcatttatgtttcttatcttatggaacttgagaatacgatcaagcttatggtagtgctatgactatgttgaattgagtgatgatatgaacctttatacacttgagcgttgagcgaaacagatatatccttgtgagaaatgctcaagcaagactcttacaattaatgggattgaaaagtgttgtggagactttgatgtgaaacttgattatactcaacattgtgattctaagattgttaaatgtgatatatgtttgattgttgatccttgcttccatcttgagattctgtttgttgctgaggacagcaatgtctaaatctgggaattatttgatatgctgctagcacatcttagtttttagggttaatttagttataattcaatcaataattagcaatatatgttagaattaggtaagtttatttatttgtttgtttttatctcattttattactattttatttcagagtcaaaaagaaggaaagaagtataacaaagaaagatatgtcacaaaaataaaactgcagaagggtttggttaccctaattaactatatggacatgaaattataaatagggacttaggaggccaacagaaagacacacagaaatacagacagaaacacagtggagagaagatcaagaccagagattgaataggattaatgcttctactctctttgtattctttgaggttagacatgaatatgtctggctaattttctttattgtggttagggccaagaaccaatgtgaactcctctgtaatttgattggtattaatatgagattattatgattgctttgttttactctgttcttcattgttatattctttcttagaattggccattctatttaagttctgagagttagggttcgcaatagggatgttgggattctaatttctgacatgagtaaaataacagtttttacattgcctagggatatggatgtatgattgcagaactttatgatatattcttttaaatgcttagcttgataagaatcactaaggaattaggatttttgatcgggttaaagggttaaattgctaaggaattaggatttaactaaatttggaaagacatatcctctgagtaatcagaagtaattgaaattgataaccaatcaagtgaaagaggtagggatcaaaggggattgtgttcttactacaattatttctctcaactgcattacaatcaattcaaatttacttttaaattcttgttaatttctgtcatttaattcacttaattccaaaatacaatacaacactacttttcaaacatattgttttcttccaatctcgcagatcgtgagttatgataaaattaggatcaatccctgtggatacgatactctacttactcactctattacttgaaacgaatggtgcactttccgtttcgcaacaatggtgccaaaacagattctgcaccaaaacagattcccttaccattcctgcaaagaaagtaatggagcttgattctgatctgcttgagaatttcaggagggtggaagtgaaaattcccctcctggatgccatcaaacagattccaaaatatgcaaagtttttgaaggatttgtacggccacaagaggaggcttaagggaaatgaacaagtgaagatgggcagaaatgtttccgcactgatccagggtaaaactgttgatgtcatcccactgtccaccctgccacagaagtgcaaggatcctggcactttctctgtaccaagcaccattggagatattatttttgcagatgccttgtgtgatcttggagcctccattaatgtcatgcgcacatctgtttatagagcactacacctgggtgagatgaaacccactggtgttgtcatccacttagccaacaagagtgtcgcgcttccacttggacttattgaagatgtgctggtgcgagtaaataatctgatcttcccaacaaatttttacattttggatatgggcaatgagtcttccaaccatggtcccacattgatcctagggagatgttgcgaaataagcacacggcaagtgcaccgctcgtttcaagtaataaaagtaggtaagtagagtatcgtctccacagggattgggatgaagttcacagtaatattaagtctaagtgattggaagtaaaaagaaataacttgtgaagaattgttgttgtgtgttgaagagttgaatagaaaactgaaattaaataatcagtaaaataagttgaagtgttaccaatggaagaaacaattgtggtcaggcacaatccccaatgtttcctacctcttttacttaactggtttatcaagtttgatcactcaaatgatacatctttccaattttagtaaatcccaattccttagcaatttaaccctttaacaagaatcctaattccttagcaattcttatcaagcttataaaagactatatcatcagggttgctgtttccgattgctcagagaataaatcttttctactttagttaatccctaatcccttagtgaattatccctttaacctgaatcaaaaacccaatcccttggtgaattctatcaagttaagcatgtaaaagactatattataaggttctgcagccacgtatccccatccctaggtaatgaacaactgttattttactaaggtcagaaattagaatcccaacgtctccattgcgaatcctaaccctcaatacttgaatagaatggtcaattctaaataagaataaacaataaggaacagagtaaaataaaacaatcaagaattctcattcaataccagtcaagttacagaggagtttacatcagttcatggccttcccacaatacacagtttagcctaccataggcttcaaagaaaccaaagctgtcaaataaaacatgattctgcagtgacctagccttgattcttgacttccaagggtttagaatgatgtatggaagtgtggagaggtgtgtaggtgtagagagtgtcttcttcagtcctagaggtctcctttttataattgccttcaagatagtttaattctggtaacaaagcctcttcctgtgccaattttcgaaccagataagtttaaatcaggaaacaggatcttcgtggcgcggatcactcggaatcccgcgctgattgcgcggtagattcgaatggccggcgctagtagcgtgaacctccacgctaatagcgtggagtccacgagctggaaggctggtactgggcatttggcgcggatcgcgagggatttggcgatatctgtgtggagctttcaaattgatgatgcggttagagtggctcctggcgcggcttgcgcggcttgttcgtgctgaagcttggattttttatagtggcgcgactcgcgcgggatctggcgcgatccgcgcgagttcttcagtttagttttctaccttcttttgccttgattctcctctttttgacatgaaatcacacatttggtaatgaaatgattttaaatcaaatataataatgaactaacctattctaatctattttcctgactatttaactaaattataacttaaaactagcctaaaactaagatgtgtttgcaacacatcaaacaattcccaaatttaatagttgttgtcctcagcaacagacagaactctaagataaaagcaatgatcaataatcaaactgaaccacaattttacaatcctagaattatcatgcttagtataatcaatttacatcaaagcttacatggtactttcaaatctgtcaattagtgagagtaacttgagtgttcctcacagacttgtgtttattcagtcattcactcaattgtatcaggctatgattgccctcttactcaacataatcacaacactaccataagcttgaaaatattctcaacagatgcaagcataacttgatcaaaaggtctttcaggcttgtaacttggctgggctaaggtaggaaattctttggatagtagctaatatgaggctagatccagtcccttaagtcctaatcctgtggtcttccatgttccttattcattcttttcaaaatctggtactttattcaacaattattctctgtggtaaataaaacaaaacaaacaaataactttcttttttattttattttctttttctttttctgcttaaattttaaacaatttacagcaactttaagattttccatctgataatctcaggcttattattctccaactggcttttgcttgtttattcttgttcttctataccaattgaattcaagttgttttccttcatgccttgatggacacttccctgtggttctgctttcatggacttgtattgtaccttctctagcctcagagaggttggtcaatggatatggctctgatttgggtaacagaaatgaaaggttaaagctcaaaaagaggtacaaatggaaaaataattgaaggtaagtcaatttggccctggttttcagaagaagaaattgccttaatcatgtcaagtcacacttgcatccagagaaacaattcaagttctagaatactatgaaaatggagtttctcaggaagaaaaataattactgtttggcccaaaatctcacaggtgctaaactcaagtcaatcattgctgacttcatttcaagcaacatttcaacttcaacatgcatatcatataacaacaattcaaattccattcatgtatcatgcaattcatgctatgtttcctttcacaaaagctttcatcagagaaatcctatccattactgtgtccattcactttttaatctgaaaaaaatttgatgtgctgctaacttttattgaaatattcagctaaaaatttaaactaataactacaacaaaaattttcttgaatgtgattcagcaaataatgcatatgcacccattcccagatttagaaaattgttgtccccagcaatacatgaaaaggattatgtgctactaaatattcaatgatgtatgcattatttaagaatcataaccagaatgaacattaatccaaacagaacttatttaaaacaataaagtaacaaaacaactaacctaaaagtaatataacacactgaaaattaaaaacaagaacagtaaacaaatgaaatagtccttggttgtcactttgctgcaggatgcagcagcacttccttcttgtcttcctcaatctcttcaccctgaaatgcagaaaaattccagacatatacttgatacagtggggtgaattcccagatttagttcactacatcacaagttgtttgttgttcacttgggataatagattgcagtgttaacagttatatgtacaatcccaacataggcctcagacacctgtaatttcaaatcagctacacaagccaagctccaattataagagaatagttagcatttagcaaggcttaccaccgtggattcccagatttaaatcctttcattggttcaggtttagctagattgtgcattagtgaatagtattcaaaaataacagcacagttcacagcaagcatgtttacaagcaattgggaaatcaatctgcctagaatttcgcagtatgcctatgattcccagatttaaaaccatgagaactcttaaaacacaaattaaaaagcgcaataacatcagttattagggttctcagtgggcactcagtgttctttatgcccttcaaacagttttcaattaaactcttgattcaggagaaccatggatttcactaagcaccaacaagataacaaacagcaagtggacaattcattatatttacaataaccagcacagtccagctaaccatttggtgcagtaatttcattcacaaacaagagatcagtctcagcaattcccagatttgggtccttacatgttcaggctcaatttaaatctaattgaaaaacccaactaattcaattcaaaaacaattttcacagtcccgcgcggtcagcgtggcaattggcgcgatccgcgccataaatcactgaaagggctttcagctcgaacacttggcgcggttggcgccactgttaacgctagtagcatgaagtgaccatgtcttggcgcggttagcgccactcttggcacggttcgcgccagctcatgcagatggaagctcagggtcgaatggttggcgcggtcagcgcgagtttcacgcggttagcgtgaattggccgtgtcttggcgcgattagcgccactcttggagcggttagcgccacacttggagcggttagcgccacacttttgacaggccatttctcgttctttttaaatgctttttgtgctgaactaaaaatgcaataaccctaaatgcctaaaatttaacatgcatgaaatataaatctactgctatcaaattaaaaacagaacttaaaataccatgtatgtacaacaaaactactcaattactgtcttgagctagacgccgcctgctgttttaatcatttgtggatttaagtggaataggaacttcatctctatccacttggtcttcaaagtgaagcttcagccgacatttgttaacttaaaaagctctgcccttgtctaaagaagaaatctcaactattccatgagggaaaatcttttgcaccaagaaaggaccagaccaaaagaattctgacttacctggaaacttcaggcgatattttgataacaacacttgttgtcctggctcaatttctttttggcgaattttgttacgccacttcttggtctttcctttataggtcttagcattctctcctgcagttacggatgttttgtctgcagttttatgctccctttgtgcagcatccaactttttgacccaattcttcttaggtgtttcctcagcttcttttaaaatctttttcatcttaactcttggtgttccaattggattatcatcttcctttttctgcagcacttccagcacaggttcagatgtggctttttgatctgcaagtggtaattctacagcaaattctgttgctgctgcctctgctttttctgctgcacttgctgctaatttttctgctgcattattttcttttgtcatacctacacaacccacattatccaaaaaatctagtctagagcaattaagtttgtcagatggatttgtcacagtattaaaaacattaaaaacaacagactcattatccatcctaagttccaactttccctgttctacatcaatcaaggccctagcagttgctaaaaaggacctccctaacagcagagggatttcactttcaccctccatatctaacacaataaagtctgcagggaaaatgaacttatctaatttgattaacacatcttctatgtataataaccctggctaaaaaaaaaaaaatttactgtagcagtactgtagcccacgcctggggcgtgggaagccacgccaggagcgtgggaactgctccagaaagtgaattcttgctggaatcccacgcctggggcgtgggaagctacgccaggagcgtgggaagtgttccagaaagccatttttggctggaaacccacgccaggagcgtgggaagccatgctggaagcgtgggaggcgcggaagaggcctataaaaggctatttttcacgttttgaaggccaaaaaccttggttcttcttcctccttcgtccaaacctccattagagcatcctcgaagcttcaaacttccatcataaacccataaaacacctccctattatctataaacttgattagaacccttgagaagccaaaatccagccttgttggtgagaattgagagagaaaccccttttccttggggttttatagaaattaagcgttggagaagcaagaagctggttttcagggagacagagcttggggacaagacttctccaacctttctttgttgatttgaggtaagaaacctccgttgtaaccgtttaatttgagaaatggagattggatgaatagtaaccaaatattgatagggctggaattaggcttaggttctttagggagatgtaatcaggagagtgttctgagccatatggcatgttgaaactgaaattgtgatgaagtttgagtttggctctgggaagggagaagtgtgtgtgaatgagctatgttatggcctaaactagcttcaggacctttacaaaagttgttcataaggccaaataatcggtgaaaacgtggtcatatatgcgttttggctagatggaactaatgtggattcttgattctggtataggtttgagttgaactgtacagagttctaaggggactctgaggccttggtaatgctgaggcagaccaatgagggtccatgtatggcctagtgagagctgggccaagataaaccttaggatagcggattttgaattgattgagtggaaggtgtttccttccatgtaaatggtttaatatcgtttctgactgtttgattcatgcctactgtaggacgtgaagtgcagcttgctagtagagctcaccacgagactaggggagttgattctgaactgagaccaggtaagctcagtgttttcagggaatgtttccctacttgtgtttcactgtacccaacatggggtgattacttgatttgaattgtactctgatgcctattatgttatgatatagatcatgtattgaatattgatgagatgatttgatgatggctggcaattgcatgctagctaaaccccgagatggggtgattacttgatgaatcttgtatgcatatacattttgatgatgtgattatatatatatatgtgttgattgctgatggcatgggttaatggttgctggcaaccgagtgctagctcggccctgagatagggtatgtgcttgtgttgctgcactgagatagtgcatgttacttgattatgatgaggttgaggcataaattgattgtgatttggttgttgtagtttactggccagtagtgtgaggtactatggacccattgggaatgtgcccttaagtggatgatctcccttgggataatccataggcgtccatgtaaatcctgattagatgtgcctttaagtagatgatcctattcaagtattgggcggcaagtcctgagtagatgtgtctttcagtagacgatcctactcaggcctgagttctggatagatgtgcccttcagtggatgatcctatccaggctcagcatgtggctgttgttggcatatgatttattgatactgctatgagtttgcagcttatgttatgatgttgaaaatttaaccaatgccagtgtacttgatgagattttctgtgatatgatagctgtatagtgattttgtgttttgggaagtgaaccagggggagggaaacctctgagaaccctgagtttactgagattgttatctcacccctatttggggattatgttgcaggtgcagagactaccgttactgagaaatcctaaggcaagaggcctgagctgggatagtgtgaagacaatcctaggtctagatgactggagcttgttggctcctattttgattatttttggatgtgttttgataccctgaggggtcatttgtatagttttgagaaaattggcctgtatataacagtaattcaccatatatgtataaagtactgcatatcatgacggatttatgcttcctttactgtttatttccatgcttgctgcgttactttgatattgtataatgttaatacgccgggtgcatacggggtgttacactatgacccttgatggtttccttaaagaacggcctgctagttgcaaggaaactctagtgggttttagttcagttatgcctagggacttacacattgataatgacattaagtttatactagcccctaagtcacatagtgccctccctacatttatatttcctatggctatagggatattaaaacttccagggtctttcaatttctttggaagctttcttaaaatgatggcactgcactcctcaatgagtgctatggtttcacagtcctttaacttatgtttcttagacagaagttccttcatgaattttgcataattaggcatattggctaatgcctcagcaaatgggatatttatatgtaacttcttaaacatgtctaagaacctggcaaactgctgctgttgaatttgttgcttggtctgcactggatatggggtttctcaaagcgagagaaatcccattgcctttttttgtggtgcagaattttcatctttcttttctttttctacatgtttttcttcttctgcatcagctgctgtgtttttctctttatcttctttattgcttacctcaggcttttctggtggaatgagcactttaccactcctggtagtgatagcattgacatgttcccttgggtttatcactgtgtcactggggaactgtcctggtggtctttcagaaatttgcttcgccaattgaccaatttggatttcaagattcctgatggaggcatcttgatttctgtggtgagctctagtctcttggatgaaagcatttatggcttgtatgtgctcatttgtcatttttgaagctgcattactaccttctcaagttcagaaatactggtggtgggaataggagggggttgcagataattgttagacttatagtctaaccctcccccttgaaagttcctctggtagttgttgcttggagcaaagctgtgattcttctgatattgctgctgctgtctctgatcattacacactccattaacctgcacagggtcagctccaacaagaataggacaaacattagattcatgctcaccttggcagtactcacagataacatgggcttggctagctgccacttgtgctgtagagacttgtaatctatcaattttttcattcaacttagccagctgttgggctaagattttttgctctgcaagcattgcatcattgctacacaattgaattgtctctttctttggctgaatggtggtgctctcattttcattctgagccagagaactaatcagctcataggtttgagctgcagtttttgatattgttgtaccccctgctgcaacattaacaatcatgcgtgattcaggagtcataccattaaagaaaatacgtacctgcttacccacaggcatgtcatattgtggacatctcctgatcaattcctggaatctgttccaggcagcacacaaggattctcttccattctgagtgaaattggtaatttcatttaccaacctgttgtatttatccatggaaaagtattctgcaaaaaatcttgagactaagtcctcccaagttgagatgctatttgaagtttgtctgtttaaccatctcagtgcatttcccttaacagcaaaagggaataggcttagtcttacagcatcatctgagaccccttggtgtctgatagtgtcacagattctgagaaatctgtcaatgaagtcatgtgggtcttcaaaatcttctcctccaaactgactgtgtaaggacttttattttcggcgcttaaccccgcgcgatagcgcggggattcaggtcagaaaaccctgctaagggtgcggcgccggtggcgccaggattggcgctgatggcgccaaatgtaatagcttgaattcgtaagcatatgtttaagcttagtttaagcatgaatctaagtttaagggttaaggaatatgatcatgctttagaatcctctgaaagatgcttaaaaatgcaagtttgtggattgttctggcatatggcgcgacccacttggggtgcggcgcgacccgcgccatataggtaatatggggcagatggctctgccatgtcacgcgagtcacttgaagatccacgcgagtcgcgtggcaagtggtccagaaatcatggttttttttctggggctccacgcgagtcacttgggatccacgcgggtcgcgtggaaggcccgaatgaatggcgcgagtcgcgtgggaaaacaacgcgagtcgcgtgggaagtggcttagaaatggtatttctgtctgccatcccaagtgagtcgcgtgggagtccaagtgagtcgcgtgagaacgtcggcagattagaatttaaaggccaaaacgttagaaatggaaggaaaaaccatttcttcttcctccctttagccaacctccattgttgaagtcctaaagcttcttaggacttgatttctcagcctaaacacttccctgagccttagaatcttgattgaaccgattagaaagcttgaatccttcatctaattccttgaaaaccccaatttgagtgagaagaggaacctcagagggaaaagctcagagaactcgagcttggcgcagaaccacagcgtaattggaacatagaagctaggagaagctgttctgaggctgttgggttcgccactgaggtaagaaacttaagtttcaccgtttaattttgattctgggggtccctgtgaatagtgacccatatgagctggggctagaattagctcagggtccagttgagaaagttgttcagggcttagaatagatgaaggattagctttcagtttttgattctgataactttgaatcttggctctgtatatgcctgtgtgacttatgtagagtcacttgttgatggttctctgataggctagagccttgattgtgatgctctgagctgagaggctggtagagcagggctttgaatgaacctcagcccctttctgataacgattaaattgtgaggctgagtaaggcttagttatgtatatgtgcagcgagtctagaatgactcagatggattgtattccatcctgatggaccttgagtggtcttagagcagcctagtgtaggctgagttggcttgaaccctgggataggggatttctgtatgatgtatatatatatattgtgaatttcatgtctgtggtctggttttgatgtgaaattgcatatgccttggttaggcattgattgtgagactgttgttggcgggagccacagacctgggaaggaattgctgactgagaccttaccaggtaagttcagtgtctctgggggatgaattcccatcttgtgtgccacaccacactccgggggagtggtggtcatttcatgatgcatgcattggtagttgcatcctcataatgatgtatgtatgcatatgtgcttgatattgtgctgtgatatgactgtgatagatctgttggccaatagatagatatggacctccctaggagatggttttcctcctagcatggctggctcttggttgaggtagctcccaggggattgattcccacaggccaggggattagaagttgaggtagctccttctattcttggaggtgccatatgttgtgcatccatgcgaagggttagcacccaatgggatggcacaggtgcgagttccggactcccactgatataggcgttgaggtagctccgccaggcgttgaggcagctccgccatgtttgtatgctatgcttatgttgttatgagggccagagagccaggtcagtgggccatttggttgtgattgcctgatgtatgtgttatggaagtgggccagggtggaggagaagcctccatggaccctgagcttactgagatttgttatctcaccccgtgtggggaattatgcttttcaggtgactcttctggacgaagagagcagtctcagggcaggaggcccgagtagagacgtttctgcttggctgatgacagcagatggagcgtgtaggctcagttttggattattttgtttatatatggtacccttgagaagggatggagtgtgtgtactcctgatgatttgtatagttctgtataccctgtgagggctgatattcttttgtatcaccgatgaggtgtgagtactgatatatatatttgtacagaactatttcttatatgtttatgagacatattctcccgagtatagctgtggtatagtgatatatctgcctatttctgatagatatctgtctgtatggtttatgtgttatgagaaactggatcagcaggggtgtgcttttatgctttgtgtgtgactctgatgagttgatgttgtttcatacataatgtatcaagaaaagcgattctgtgcttccgctgagttttataaactatgttttaaacgttaaactgatattattaatgataacacgtcggaggcctactgggtgttacagactgcgttccaccaatgctatcaatgaaggttttatgtcaaaatgattagcttgaattggtggcctcacaatgccggagttggatcttgtgaacataggagccagaatatcctccattagttcatcctccggtctcggctgattatttctttgttaagccatctctgcttctgactctaattcaggaattgaatcaaagtcaaagttttctgcttctctcctcctttgtctggctagtctacttcggatggttctttcaatttcaagatcgaactgtaaatcctcaaggttaactgaaccttgcataaaactcagagaagcgattagtaacaaaaattccaattacaaagattaaaaattactgtaaaaatccatttaccaatccccgacaacagcgccaaaaacttgttgcgaaataagcacacggcaagtgcaccgctcgtttcaagtaataaaagtaggtaagtagagtatcgtctccacagggattggggtgaagttcacagtaatattaagtctaagtgattggaagtaaaaagaaataacttgtgaagaattgttgttgtgtgttgaagagttgaatagaaaactgaaattaaataagcagtaaaataagttgaagtgttaccaatggaagaaacaattgtggtcaggcacaatccccaatgtttcctacctcttttacttaactggtttatcaagtttgatcactcaaatgatacatctttccaattttagtaaatcccaattccttagcaatttaaccctttaacaagaatcctaattccttagcaattcttatcaagcttataaaagactatatcatcagggttgctgtttccgattgctcagagaataaatcttttctgctttagttaatccctaatcccttagtgaattatccctttaacctgaatcaaaaacccaatcccttggtgaattctatcaagttaagcatgtaaaagactatattataaggttctgcagccacgtatccccatccctaggtaatgaacaactgttattttactaaggtcagaaattagaatcccaacgtctccattgcgaatcctaaccctcaatacttgaatagaatggtcaattctaaataagaataaacaataaggaacagagtaaaataaaacaatcaagaattctcattcaataccagtcaagttacagaggagtttatatcagttcatggccttcccacaatacacagtttagcctaccataggcttcaaagaaaccaaagctgtcaaataaaacatgattctgcagtgacctagccttgattcttgacttccaagggtttagaatgatgtatggaagtttggagaggtgtgtaggtgtagagagtgtcttcttcagtcctagaggtctcctttttataattgccttcaagatagtttaattctggtaacaaagcctcttcctgtgccaatttttgaaccagataagtttaaatcaggaaacaggatcttcgtggcgcggatcacgcggaatcccgcgctgattgcgcggtagattcgtgctgaagctttggattttttatagtggcgcgactcgcgcgggatctggcgcgatccgcgtgagttctttagtttagttttctaccttcttttgccttgattctcctctttttgacatgaaatcacacatttggtaatgaaatgagattaaatcaaatataataatgaactaacctattctaatctattttcctaactatttaactaaattataacttaaaactagcctaaaactaagatgtgtttgcaacacatcaggagacctttcttgataacagcaaggaccaaaattgatgtgcatgcaggaactgtttctatggagtttggtgatgacattgttcagttcaacattttttacgctatgagacatcctgcggaggagcattctatttttctccttgatatcattgatgttgcagtagatagtgtagatatttctgatttactttttgtcggtttagccatctcaaagcatgtcctttgacagcaaaaggaaagagactcagtcttactgcgtcatcggagactccttgatgtctaatagtatcacagattctaaggaatctgtctataaagtcatgtgggtcttccgaatcatcccctccaaactgactgcgttccaccaatgctatcaatgaagggtttatatcaaagtggttagcttggattggtggcctcacaatgctggagttgggtcttgtgaacataggagccagaatatcctccattagttcatcttctggtcgccgtcttggctgattgggttgctcttcagccatttctttttctgactctaattctggaagcgaatcaaagtcgaatttctcagcttctctccttctttgtctagctaatctccttcggagtgttctctctatttttggatcaaattccaaatcctcagagctaactgaacctcgcataaaaactcggagaagcgattagtaacaaaatttcaatcacaaactcttaaaattactgtaaaatctgtttgccaatccccggcaacggcgccaaaaacttgttgtgcgatcacggcaagtgcaccgatcgtttacaagtaataaagttaggtaagttgagtatcgtctccacagggattggaaaaatttcacagtaatgatgaatcaatgtgattgaaagtaaaaacaatttaatttgagagaaagttgtttggtgattgattatattaaaacagaatttaaaagacacagtaaacaattgaaaagattaccaaatgagtgataattgtggtcaggcgcaattccttttgagttttacctctttcacttgactggattattaccttaaagttcacatatgataaatctctactatgatcgtaaaccctagattactagcgatttcaccctttaattcgatcgagaaccctaaacccttagcgattctgtcaaactaagcattaagagaataaatcatatggattcctgttatgattgctcggagaataagtcttttcgatattagttaatccctaattccttagtgaatcaaccctttaaactaaattgacaacctaattccttagtgaaatctatcagtctaagcatgtaaagaacatattataaactccgcactcacgcatccctattcctaggtgaagaacggatgttattcttaacaggtcagaaattagaaccccaacgttcccattgcaaagtctaactctcaatacttatctagagtgatcaattccaaataagatgaataaacaaaatagaaaagaattaaaacaatcaaaacttatgcattcaataccagtcaaattacagaggataactcatcagttcatggccttcccacaatacaagaattagccagccataggcctcaagaacaccaaagcagatgaatacttcatagttgtgcagaactctggctttgaatcttgatttctagggtttagaaagataaaactatgtttctcaatgtatgtcagatgtattctggctatctatggatgtctcaggatcccttaactctgttcagaggcctaatatatatagaaccattaaattacagtaagtaagcccatagcccatgataatttcgaagcaaatcttttaaatcaggcaaacaaataatcctggcacgaccagcgcgcgattccgcgcgattcgcgcggtctcttcgaaagcttggcgttggtagcgtgacattccgcgctacccgcgtgaaatgttcgagtcttcaaccttgttgcagggcttctcgcgccagtggcgcggaataggcgcgactcgcgtggcttggtcgaaacaattggtctggcttatgttgatggcgctgatggcgcggcttacggcgctgatggcgccattcttgcggcttgttcacactaatcgcgtggattcccacgctgatagcgtgagaccttcgagagcacagcttcaatcctgcaactggcgctactggcgtggcttaccgcgctatctgcgcggcactttagaacttggcttcttatttcttgttcttgagctcctctttttggcctgcaaatgcttaattggtattgagtaagcttaaaacaattaaattactaaacttaactaattctattctattttcctacatatttaattaaattctaacctaaaactagactaaaaacaatgtgtttgcaacacatcagtttttgagtctgtatgtttttgttgtctgtttctgttgttgctgtttttattgaatttaggcactttttcatgtttttcataggatttctaatttgcataaattgtgagaaatgttaaaaagttggttggattgagaggtttcatacttgatgtgaatcattgttgcaattgttgaagtgataagtaggcttgagaaatagaatttaagatgaaccatgtgtggtagaattatgccttgtgagtttttgagcctttgtgagtatgttctttcatgtgtgatttcaccccttatgctagattactctatgttttgccttgcctcttttgacattccttgttgcacatgctttgatcgagatgatttaggccttctttcttttagctactagccaaataagtctatccttgtgttgatatccattgtcaccctctttgagcctttagctttttcttttttgtttagctcattaaaaactaaaaaaaaaatgatggaaaaccatgttaccctagctttagggagaaaaagggctttggaattgttttgggagtgggtttcaaacaagtgtggggtgtttgtcttttgttttgttttgaaagaaaagaaaagaaaaagagaaaagaaagagttcaaatagcaaaagttcaaagaaaagaagaaaaggaagaaaagtagaaaaaaattgtgtataagcaaagaaaaagaagttcaagcaaagaaaaaaaaataatatatgcaataaaagttgttatagttcattttcatccttgtaaattcttttaaatttcaccttgcttctacccttcttttatcttgttggcttgctccccattgtccctcttttctcttaagctttagcctaaatatctttttcttatccacattttcctaagccattcattacaagctaataaagtccttttgatgcatgtgtatttcaagttgaatgaatgagaggtttgtcaatgcttggatgtgctagttgcatgtggtgtttgagtgtaaatacaagccatacacatcatgtgaggttgagtgccaccccttgagagaattctatcaccttggtgcattcttgattctaaacttgcctactttttcactttgcaatttgtggtcatgttttcatggattgtttgttacctcaacattattcttccatctttccatctctcacttttgagcattgttgtgatccattgaaaaatatgtgtgcctattgttatagatgtttgcagaataagcttgaggagcatcagggccaacatgttgctgtagagagggacatgtatcagtataatgatcattggaagtgcagataccacaaactctggcaatagaggcagacttttggttaacagcaagttgagtcactaaattaaccaaagcatctaatttgccctctaacttcgttgctgcagatgaagaagaattagcagctacatcatgaactcccctaataacaatggcatcattccttgcactgaactgctgggagttagaagccatcttttctatcaagtgcctagcttctgcaggggtcatatcaccaagtgctccaccactagcagcatcaatcatactcctctccatgctgttaaggccttcatacaaatactggagaaggagctactcagaaatctgatggtgtggacagcttgcacacaactttttgaatctctcccagtactcatacaagctttctccaccaagctgcctgatcccagaaatatcctttctgatggccgtggtcctagatgcagggaaaaatttctccagaaacattctcttaagatcatcccaaccagtgatggtcctgggagcaaggtaatacaaccagtcctttgccactccctctaatgaatgtgggaatgcctttaagaaaatgtgatcttcagggacgtctagaggtttcattgtggaacagactatatggaattccttcagatgcttatgtggacattctcctgcatgaccatgaaacttaggcagcaaatgtattagtccagtcttgagaacgtatggaacatcctcatcagggtactgaatgcacaagctttcataggtaaaatcaggtgcagccagctccctaagagtcctctcacgaggtggaggttgagccatattgttctcagtattaatatgatcagcagaatcagaaatggtatgcacagaattaaagttggtggaggcagaaggagactgctcagaattcaagctaacactatctaatggtacagaatctaatgaaaaatgcctagagtgcctaactaatctgtggtaggtcctgtctatctcaggatcaaagggttgtgagtctcctggattgcctctagtcatgcactatatgcgacagaacaagcatttggcagacaagcataaagagaggtaaaactagagctatactcaaacaaagtccaaatgagctgaaattttgtgagcagcaccctaaaatcatgaaaagacagcacaccaaatttcaaagctaaattcaaaggataactatataaaccagattaagaaagttttgaaaaaataggaaaataaaatgtcaaaaataagaataaaatagaaaacggcctttttttgaaaatctaatggtggccagctggcagagtcagctgggatggctagatcttttttttctaccccaaaagcatataaaatatgtccaattttgacggtcggatcaaaagttatgataatttgaagttgtcgcaaaaattggcttcccaaaattttttcatttcagaatctggactactttgggtgcttttggtatttttctgcacaaaatataggccaaaataagttatcacacaaaatttcaagcaaaaataacaagtctagctatcaaaaccaaaaatcacaattaattcaaaaaaaacaaactaggtactgttcattactgttcctgcatgttgttctctggtatccacgaattgcttgctgaatacactaattggacctgcagaattgatcaacacaacccaatatgcaagaaacaaaaagcttgaagcacaattatagcaagccacaccccttaaaaacaggaactgatataggaaaaagccaccaattcaagttactatttcattggttatcagggtgaaattttccagctcaactcgaatgctacctttcttcctctaccacttgcaacaatgaacaataataacagaacataaagcaaaacaacacaaacaaaatagaacacacacacaccagaaccctttcacagaactgatgatccccggcaacggcgccaaaatttgatcgatggtcgtactcgatcaaattaatacaattaaatgcagtactaggaagtgactcctaggtcgtctctctaggatcaattgtctgtgttaagggattaaacgtgtaatggggggattctaacagaatgcaagagtatataaaataaaacagaaataccaaataattgcagtgattaaacaagtcagacctttgaacagattgcgcctctaatgtcctcggttcacgaaagataatctatcctaacttaatccttgttagtccagattaatctaccaagcgaagattaacctaaaacttccctacacgaattaagcaaatgcgaacctcgttaggcctaatctctcgggattaagcaacctgagattactgaatcaaccaactcagaatcattaagcatgactctaattcgaaaaagatacagaacagagacccaacaaggaagaaccaagcagaacagaattacaagtacagagaacctccattaaaggtttgcaatctgtcctagggtccaaccctaagatttagccttccattaattcaaaaattgcaacaaaaacacgaattaaatagcagccgaacattaaacgaaactagaagagaaacaaaattcaaatgcaaaaacgaaacttaacaaaaatgaaaccttcagcagaataacccacagaaatgaaaacctaaaaccctaaagagagctgagcatgaaaaattctctttttcttgcatgggcacagtattctaaaaatactagtgtctgacctccaacaaaaaatgggtctttcctaacaattttggcccaaaaattcactaaagcaaaataaaacgaaaataaaatgctgatgtggaaaatgatgctgacgtggcacttcaatcttcaagtccatgaattaattccaagcccatttaattattaaactgccctgaaaataaaaattggaataattaaactaaaaaaaatccaaattagttaaaatctgaattatcggtccaattaaatcctaaatgagaaacagtgcggaatataaacgattaaacacaaatcagggattaaaatgagtacagaaaggtgagaaaaataaaggtaaatagtgactcatcacaagcacaatcccttttgattcctaccactttcacttaactggtttatcaagtttgctcactcaaatgatatatctttcctagtttagtaaaccctaattccttagtgattcctatcaagcatgtaaaagactatatcatatggtttgcctatttctgattgttcagagaataaatctttcctactttagctaatccctaatcccttagtgaattaaccctttaacctgaatcgaaaacctaattccttagtgaagtctatcaagttaagcatttaaaagaccatattataagttctgcagccacgcatccctatccctaggtaatgaacaactgttattttactaaggtcagaaattagaatcccaacgtccccattgcgaatcctaaccctcaatacttaattagaatggccaattccaaataagaataaaacaataaagaacagagtaaagcaaaacaatcaagaaattctcattcaataccagttgagttacagaggagttcacatcagttcatggcctttccacaatacaaaatttagcctgccataggcctcaagaatacaaaagctgttgaataattcatagttatgttgaaaccctagccttgattcttgaattccagaggtttgtagaagtgtttctggatgatagattgttaatggatgaataatggatgatgtccttcagtcctcagaggccttgtatttatagaataatttaattaaggtaacaaagcctaaaacagtgccaaaattcgaaacagataaatctaaatcaggaaacagaatctctatggcacaacccacgcggagtcctgcgctgatctcgtggactgctcgaatggatggcactgatcgcgtggaactacgctaatagagtggagtcttcgagctgaatggcctgatgctggacttctggcgctgatggcgcggctgtggcgcgatccgcgcggaggcttcaaataagtggcgcggttagcatggccatggcgcgagtcgcgtgacttcttcgagttggaaggttggcctttgagcatctggtgctactggcgcggagtgtggcgctgatcgcatggcttgtttgaatctgaggcctgttgttatgcacttggcgcgactcgcgcgggatccggcgcgatccgcgcgagaccttgaatcttgttttcttccttcttttgccttgattctcctcttttaagccttaaaatgcacaaatggtaatgatatgagattaaatcaaacttaataataaactaacctattctaatctattttcttaattatttaactaaattataacctaaaactatcctaaaactaagatgtgtttgcaacacatcaatgatatttcagttagggttgtggtttcaatcaattcaggggttaagtcgattgagttgcttctaatgagattgaatgaactttcatgataggattaatttctgagaacaatgatgattcgaattgcttggtgaggtgaattggattgatgttttaaattctgttttacattaattcttttgaattctgttagtttctgtgttgctctttaattttagtttacgtttttgcaagttttacttacgcacacaaactgtttgataaaattccccccttacttttaccattgaattgaagttagaaccatattgatcgtgtctctgagtcgacctaagttatctctgtgctacagaattagcttagttaaattgttttggtgcatctcgacaacgtgatatcaccaacggctcgacttctatccatttcatgaaataatcaacggctacgataagccatttaagttgtccttccgctggcttgaacggtcccaaaagatccattccccacttgtaaaaaggccaaggggatgtgatggtcatcaactcggatggggacgaccatatggtcctggcgtgcttttggcaactttcacatttttttacatgttcctgggagtctgtcttcatcatcggccagtagtacccgacccgcaaggctttcattgctaacgcctttgctcccatatgttggacattgatgctctcatggatctcagttatcacgtactctgtttgattaggacccagacagagcaacataggggcatatgggcctttatgatacaactcaccttcttggacgatatacatcaccgcacatcggatcagtttctttgcttccatggggtcatctggcattactccctactctaaatatttaattgtgggttatctccaatccgtgcctgccgaaatcatcaagatacaagttgggtggaataattcctgttggatgaccatcctgtgattgcctatgccctttgtgcttgccagcttggataaaatgtcgaccctcgtgttttcttccctagggatatgggagagaacaacttcgtcgaattcggcaatcacttctttgactttggccaaatatttgatcagcaaaggtcctttggcctggtatttcccctcgatttgagacgccacgagttgagaatccgtgaacacattcatctttcgagctccctgttccctggcggacacaagtccggctattagtgctcggcctgattgttggaggttgggaaattgaattgtagggattgttcagtggatatcccctgggggctttctataatgatcccagctccgcttcccttcccgttggatgattgatccacatataacgtccaggcctttttaattttcgaggtcagagtgagctcgaccaagaagtcggccagagcctgggatttgatcgcatgccgagctttatattttaagtcaaactcggacagctggatcgcccaactcatcattcggccagccaagtccgtcttatgtaaaacttgtcggattggttggtcggtgcgtataagaatggtatgactctggaaatacggtcggagttgtttagcggccaccaatagtgcgaaggctactttctccagcttttggtatctcaactcggagttcttcaaagcccgacttacaaaatatactggaagctgagtcttgccgatttctctaactagcgcggaacttacgcctctttcctaccgacaaatataatattggtggcaagatgagacatttcttaatttcttggaaagcggcctcacattctgggctccagccgatggtagtgtcctttttcagcagcttgaagaagaggagtgccttgtccaccgattttgggagaaagcgggtcagcgcggccaatctaccggttagctgttgtacctctctcttatttgtcgtgaatttcatgttcagtaccgcctgaaacttgtccgggttgacttttattcccctgttagtcaacataaacactaggaatttgcccgcggtcacaccaaatgcgcacttgaggggatttagccggatgttgtgatctctcagtctacggaaagtttcttctaggtctctgatatgattcccactcgaatccgtcttcacgatcatatcgtcgatataaacttcaatattccaaccaagctgttgtgcaaaaaccttgttcatcatgcgctgataagtggcgctggcattcttcaaaccaaagggcatcacgttataacagtaattggcctcgccccctctgaatgtcgttttatctcggtcttccgggttcatgggaatttgattatattcggaataggcgtccatgaacgacaacgttttgaacccggaagagctatcgaccagctgatcaatgctgggcatcgggtaggaatccttgggacatgctttgttaacatccatatagtcgacgcagaccctccattttccgttagacttcttgaccatcacaacattggacagtcacgtggtgtattgaatctctcgtatgaaactggccaacaataattctctgatatgttatccaatgcttgctttcgttctggaccgagattccgcttcttctgttccactggtttcgaaccggggtacattgataatttgtgccaacagaaagttgggcttattcccgagatttctgaagccgtccactgatagagtgcttttagttgagtatttttctatccttcttagctgatttgacttctcttggacctttattttcctattctaattcagtttttggcctaggcaagtaagtgggcttaattgctaatcgttgcgtattttcgaatttttgctcacttgacgtatctgacttgtgcaggacctataaggtgctaccgatctctgaatggagttttctaggtgtccctggaaagataatgaaaagatctacaagtttactagaaatagcccgaggccaattctgtcatttagagggtcattttaagcttggaagttagcgcctctgcacttgtaattttgggttgcgaatttgactttcatggttgtaaatagcaaataattagattgttggacttgtttgtggcccattttattttcagaactcagtcactacatatattagtgactttagtgaaacttgggcaccactctttacatttcaataaacaagatttatttttctttcctttagtttttagaatcaaacccttgttcttcattttctctctactgttcttcattgttcttcattttcgtttttctgttcttccattttcatgcaaccatttcatggggctttcactgatgatgatcatggaaggctaaatcctcaatcaatccaagaatccaacccaagcacaaagagaatttgagttctggtttagtatttcgaatcctatgtgaatgttcatcttcttcttcaattgctattctgttttcatgattatgaatgcgtttaggattgaaaacggattaggttatggattcatttcctaatttcaaacattaattacagaattaattggatgatatttcagttagggttgtggttttaatcaatttaggggttcattcgattgaacaacttctaatgagattgaatgaatgttcatgataggataaatttctgagaataatgatgattcgaattgcttggtttggtgaattggattgatgcttctctaatctattttactcacttgttgataatcttgttaatttctacactgttctttaattttattttacatttttgcaagttttacttacaaacacaaactgtttgataaaattctcccctcactattattcgtaaattgaagctagaaccatattgattgtgtctcttagtcgacctaggttatctctgtgctatagaattagcttagttaaattgttttggtgcgtgtcgacaatgagttatcatccacgcgaaaacatcccggtttcgcatgaggcattctatcaattccgttctggcgaccgggtcgataattctccctatcttcatgatttgagaagcttgagatccaatctgcacttctccaagttcatccgctggttccggcctccactcttcaacgtcgtctttgacgtcgagctctaccaaattgatgggcttgctctgttgtttttcactagttgtttgctcttggttctcttgatggtggggtggacccacctcttgccctctcaccatgttgaagtaacactggcgggattccttctgatctccacaaacagtcaccactctgtcgttgctgcctataatctttaacttttggtgtttggtggacatcaatatatcccatttatggatcgtaggcctactgaggataacatggtacggtagagggaattcagcaacaacaaatttcaccctttctgacctgaaggcgtcctttgttcccaacgtcagccgtaactcgatggagcctttgaacgcggtattttctccattgaaacatgttaacattgtcctacatggttttaagtctacctcgtcctaattcatccttttgaaagcagtccaggatatgatgtccgctgaactgccattatctacgaatattcgcttgacttgacagttggtgatatgcgcctagcatataaggttttaccaagctttttagagcaagaattgagcatcaagcatggataatttcctttttgtgttgtgaattgagctaatgtgataaattgccaggaaagcagccacaagtgccaagaccttgtaaaaatcagaagaaaagagcccagtctgaagaaagctatggcgccatcagcgccagctgtggcgccaagagcgccggaagcactggaagctggctccagtgccgcgccaaaagcgccgctagttctgaaagttggcgcctagagcgctggatccgcgccaggagcgctaggttctctggacttcagcgccaagggcgccatttcccgcaccagactctctgtcagccagcgccaggagcgccaattccgcgccgtcagcgccgcaagttctggaacccggcgccaagctcgcgccaagggcgccacaggtcgacagcaacagcattttaagggcgaaacaaagacttcacaagctgggctataaataccttaacccttagcattcaatgcacgattttggagggagaaaaacacaaaaatagggttttagaagcttgggtgccttagttaggggttttagggatttaaaggtcaagtggggttgcttctccatcttcttcttccttgcttcagctaggtatgccattttgttttgtaacacagccacccattatgaggtttggctagttcttcattgtagttagggctaagcactgaatgtaacctcttttgggattgtattggatgttatcttttattaatgccaagttatttcattttatcttgttgaatgcatgtttctatctctctctggaattgatcactctagttagatcttgagagctgaggtttgcaataggaatattggggctctatgcttggacttaggtaaagtgacaagctttacattaactagggatagaagtgtatgcttgcaaccatttaatgcatcatttaatgcttgacctaaccaatatcactaagggatgagggtattagagtaggttaaagggttaagaacactatgggagtagggcttagctactattgttgaagatgcatgttgggtaatttgggcttgatgaaggtggtagtcaatacatgaacaagggtaggaagcatttggtgtggattgccctagctacttaaccatatatcttattatcaacctccatagtttgtctatacgcttatgtttatatttagttcttagtttagcttatttctcacatacacacaaaaacaaccttattcattctttatttgttatccaacttatcgatttaatttatgatttaattggtcaaacaatcctcgtgggacgataactctatcttatcactttattacttgagcgaccggtgcacttgccgagtacgcaacagttggctatagtccctgtaatcaccaagccgtcctcgtgaccggggatcacatccttcatatcttcttcagtgaaaaagagtatggggagttcgggtttatcacttcgttccttgaatttagtttgctctcttacggtcaggacttctctaaggtatttccaacgctggttggttgcatctcctcctcctcccattgcccccgaaatcacattgcactcgaattctggctccgggaactcttcatcgccatgtttgcttctcttttcatcccagtctttttggtcgtcggtctggttggcttttcgcttgcctcgttgcccttgtgttttgatgacatatcgtcgcagcttgccttctcggatgaacttttcaatggcatctctcagatcccaacactggttggtggtgtgactcggtccgttgtgaaattcacaaaaacgagagtaatcaaggccggttttcttgaacacgggccgagaacgatcgaccttcttcattttcgtaagcgctacttctctccatacctgcacctgggaagtatttaacggggtatatttgtcgtatttagtatcatatcgtctgggcgcggcgtcgttatttctgccgggatggatacttgcggggtgttagcggtgccgtggaggagaatgtttccttttgggcattgtattggcgatctccatctgctccaactccaagtatttctttgatcgaaccgtaaattccaacaaagtctttactgggtctttgtaaatggatttggccagtcgggaggatccactgagtctggctgacagcaaatgtacgtgcaccttttcttccaagccttgtacctgtagtgcagcctccttgaaccgatccagatagctttgcaatgtctccccaggttgctgacaaatcttccccaaagcaaactcggacttaggcctacttagtcatattgggcctactaaaatggcccatcccaattatccgtaatattattcatggtccatgcaaagatccattgcatccatgtgaaatgatgtttttagtcaaagatcaaggtggtgatgacactgaggtttttagaaactctcaatgaaaatgcaatgaaaaatatgagagaaatggtgtcactcaaagtcctatgaaaaactcatttttatagcctcagaactaaatagtcgatcatgactaagagatagtcaactaaattgttctttacatcacctatgttttttgaagaacgtatatttgattatattaccatttaattaactgtctgtgatagcgaaaaactcctttagactcaaatcatcaatatgtacataagatagtcgactatctgttagttattctcaatttgggaaatcaaaggctcgatatagtcgactatattagtatatagttcaacttgttgaatccacatccctaattttaattatgataaaacattagtaatgcaaattgaaaggatgatggaattaagtgatgactaacattttccttaagtgtttcaaagtttattactttgagaaacatagatgttttttcattctaaggtacttagaatgatgcttaggaaggttcaaagaaatgttgtcagagttgagaaattagaagaattcttgaagcctataaaaatggtgaaatcttcttcactctgattacttagtttatggcaaaatactgaacaaaacaaggccttacatagaagaatcatctaaggatacatgaagaacatcatggttcagaatgaagttgttcaagtcaacattagaatgatgaagaggaagactttggcctctttatatcaaagtagttcagaaagactcaaaatgcatctcttgaacaatttgagtatactaaagtctcacagttcttcattttgcatatgttgtcataatcattgaaagtacatcaggaagaaagaaatggttgcataagaagatgcaagactgttagatgatgatgttgttcatgagaggcactgatgggaagcaacagattgaaggactaaaggaagctactcagtctaaccttgaacagaacactaatacaccaacagttaaatatctctaagcctttttgaagaaattagttcataatgcttaaagatgtgaagaagtgttaaaagtgatgaagtcacactacatcataatgaaacatctatctaaacttcatcaaaggaattcatcaaacattggttcattctagcaaaacattagaatgactattatgatagttctttagaatgaccataaaaaagttccttagaatggttcctcagaatggaacctcataatggtttgacaattgtcaccccattacagatggaaagtgattttgcttgctccagaagtatgatagttgtgtgaagcccactccaaagatctgtgttgaagctttttaaagcattttcgcatgctataaagaaccaagttgaaggacttcatttctacaacatcttgaacaaaatctctatctgagaaatatgtattctaacttgaacagaataaagaaagaatctctttgttttagactaaagggtttgtaagagcatcagactagatcaagagtgtgtaacgcgtagaggaatcaaattaagaatgcacaagggattagcagtgacagggaccaaattggtaatatttacacgtatagaaatcgatttaataagattttgcgtaaaagaaccaaattaaaaatccgtgacacttattgtagcaacaaaaatggctccctcattttaaataattcaaacatgcattaattagttggcaaattcatttataacttgattaagaaaattaaaaaccatgttaaaagattttttatgtgttgttagaaagaagatctattattgataatgctttagttgctgctaaggtttttcattttatgaaatgtaaaaagactgggaaaagaggagacgtggctctgaaaatagatatcagtaaagtaaagcatatgacataattgattggagttatttgcaaaatattactaaacttggctttaattctgattttgataagtggataatgctttgtgcatcatctgtgagattcttcattaatgttaatcaggatgtgattcgccctattatccctataaggggactttggcaaggaaaccctctctctccttatttgtttatcctatgtgcagagggtctatctgttttgattaaagatgctgaaacaaggggggacttgcatggtgtccaagtttgtaagggaacacaaaatgtctcacatttactctttgcggatgatagtttcctcttctttaaagctcagaagagggaagctattactataaggaaaattttttatgactatgcaactgcatcagggcagatgattaatctccaaaagtctgaggtgacctttagcaggaatgtgaagcaagatttgaagaacattatatttgtgttaggtgtgacaaaaggaaatagaggagggaagtatctaggctttccatcttgtgtaaggagaagtaagaaggctatctttaattttattaaggatagggtctcgcagaaaattaattcttggagtggaagaattaatgctttttatggctggtagggaagtaatgataaaatttgttttgcaagttgttccaacgaactgcatgagcatatttcttattcctcaaactttgggtgatgaaatccaaaggatgatgaacttatattggtggggttcgagtaaccgagcaacaaaagggatgcattggctatattgggacaaactgtgtgctttaaaggaggatggtggtttggactttggcaacatctatacttttaacttggacatgttagggaaacaagtatggagatttatttctaatcctaatgctttgtcatcacgagttttcaaatctaaatacttcccaaatggggattttatgggtgcaactattggtaataacccatcatttacttggcggagcattttttttttctaaaatggtgttaagagagggtgtcagatggaagttaggagatggagcaaaggtgaaggtttggggagaaccatggctgcgggaaaaaggaaatgcttatatcaaaactcatgttattgagggctcggagaacttgaggatgggtgacatcattaatcacgagcatgcttgctggaatatggagttggttagccaaatttttcgatcaggaagatgtcaatgctatagtgaggatcctgttactgaatacctcacatgaagatatgagaatttgggaaaacactccaaatggtgtctatgctattaggagtccgtataaaaccatcatgaagggggttgtggtcaatggaaatgttaaggtgcctggagattggaaccatatatggaatggaaaatacctccaagagttaagaatttactttggaagaaatgcagagggtgtaccccaactcgcgcaaacctcaattccaggggtgtgttcagtgctcaattatttgtccactgtgagagacgtggaaacatcaatgcatgtattctttacatgtgatgttgttttggggtgttggaatcgtgcccacttgagccaagttatacagagaaatgaagggggttgtggtcaatggaaatgttaaggtgcctggagattggaaccatatatggaatggaaaatacctccaagagttaagaatttactttggaagaaatgcagagggtgtaccccaactcgcgcaaacctcaattccaggggtgtgttcagtgctcaattatttgtccactgtgagagacgtggaaacatcaatgcatgtattctttacatgtgatgttgttttggggtgttggaatcgtgcccacttgagccaagttatacagagaaatattgtgttggcagaatcatgttcagggatgattttttggctacttgcatgcttgtagctggagcaaatcaaccgaatagcaatggtgttgtgggggatctggaggggacgaaatgaaaaactttggaataagatccaattctaggaccagttagtggtgaggagaagtgatgaattttatcaaagctggaaaaatgccaactcgaagggatctatgcctctagcagggaacataatgaatgagaatatgcaatggaaaaaaccagcagtgggattctggaagtgtaatgttgatgcgtgtttctttgaatatcaaaacaaaacaggtgcggggatgataattagggatgaccagggacgtcttacggtggccagaacaacatggaaggagccatgtatgcaagtctatgaaggggaagcttggagcctcttggaagctttgaagtatgttgtatgctgcagatatggaactaagtaacattattttcgaaactgattgtaagcttgtgattgaaagtatcagatcccaccgaattgacatctcagagggagggaacttaggtaatgaatgtaagaaattattgatccaaaattcatcctgtgtgttagaatttgtaaagacacaagctaattgggtgctcatgcactatcaagggtgaccccattttatcctaatctctatgtttttaaccatgtaatacctgtgtggagaaattaatgactaatcaaatgagataagtattaagtattatttagtaacaaaaaaaaataaaaggaaagcaattcggattttaatcaactaaaattgtctaaaggagaattggttaattttagcacactcccttctcatattttacttttagatttattttttggattatcatgatattgttatgaagtatctactcattttattgatgactaatatttattgagaaatcttattgaccacttttaatagagtttttcttttcaattacattttttttcaattacattgttttctagtatcaacttgttgatacttttacatattttaaccttattattttatttcaaaatatttgatgttttaaaatttcaaaaagtctcattattttttatcgattatacccttagctattgtagttgagataaataatcattactagtgagagattaaataaggattttagtctaaatttatattcattaaatattttttaatccacatacttgactataaatatttaaaaatatggaatggaggttgtagttggtaaccttagttaacatgtcttttacgtcacacatgaatatgagttagtaatagcctgtgtgtgagagaattttcctcggtaatttgggaatcacctctgacctttagggcttgtttgggagtgggattttggaggggaaggaagggaagggaaaggctttggtagatatacctccttgtttgggagttataatttttgagggaaaggatttggagatttttaaaaaccctttgaaatcctccaaatcctacaaattggtgttccccctatttggggggtttttcgaaggaaaaataattacaattactattatacccatcaatgaaattcatgggttggtcttgcacttaggttttccgttttcatttcccccattcttcaccacgcagccactgagcggcagcttcaaccttcgagttcgagccttcaccgcagcacctccgccatctcatctccttcaccgcagcacctccgccatctcatctccttcaacgcaacacctccgccaacaaagtgcaaggtcctctccctctccctctttctctctctctctacaatgctctgtaatcttttttcattgcgattttgcctttgatttgatctcatgttcttttgttcacgatttatttttcgatttaccattttctagctataaagcattagtatcaacaaattttctcattggtgtgagttttatactgaccatacttcaagcttgtttctgaatcaacataatggcttcgtagagaatcgtgattcaagttctctgttgcagcttgttcctcagaacgagaatagactttctccacatgttcccccaccatgagctttccatgctttttcagtagatgcagaagatatctcagtatctttttctttgggaggtcattgggtccaagtttatcgaacaacttcttaatagatcgttgctctattaagatggcctttggggatgttatattcagtctagatgctgcaaactgaagagctttaacttcataatcatcaactgaatctgaggttaaagtaagcgactctctcacaaccctcccagcctcttcttcattagggtccataaccaatcttgtacattctagatcatgaattattctagaaacttgcgagtgatatttcagtgtcaacaaacaaatcaccattttaatctggataattcaatagcatcaggaaggaaattgaatagagaatataacttggctaacctctacggccaacattacaggaaccatatcttgaatttggattaagcttttctctaatgatcttgttgcctttaggcatcttgagagtactgtatcccctgtcatagcctgtaagtaatattgaaaccaacgaaactatcatcagtattcagtatcatgcaacctgcaattataatccactgataagggattaggtcatacatatttttagtcgctcatacttttcttagtagtcatagactcatcttataagcttgagagcagtgctaccagcacactctttattattggttaaactaattagaaactggaaagtcatgattaggtaagaattaagagacagaatttggtgattttcaatcaattttagcaaatagtaaagagagtgtgttcaaaaggatatgctagagagtgttttactagcatttctctgccttgagtagttttagatattattgatgcagagtacagaaaggtaaaaaccatataatttgtttctttttttaataaaaaagtgtacacaccaggtagagttttctacattcagagcaatgttgcagaattagtttgactttttcaattgcattgttcagcaaacatagagactctattcctgatgagtatcctggccgtgcagcctctatgtctggaactattcttgaaattatgtggaacccaaggcagttagaagttagaacttataagagggacaatttgttctgggtaggcagcagtagtatgtatagattttacaaggagagagtgaggtgtgattaggaatctaattagcatcattgaggattatatctaaggcttgggactggaaaatagtttttctctcagccaagagttgtaatgctgaggaggcaccttccatctttgtcgtgatataaactataatcacctaatttcagcaataataatccctgactctgtattttgcttttcactcgttctctatcactatttcattcccttggttatatttaattgtaaagagctgagttgaggaaaacattgatgtaggtttcatgattgccaaatgcattcaattttattttgttgttttctaatcttaactagatattcattttggcctcttttctctcttcaaatttgttgatcaaactagttgtcaaaattgaagtgaagaaactttgtatctttttacatcaattagcttgtttttgtcatgttccattgttccagagtatttacagaaaccttacaattgaatcagattccttatctgtgtaatactatactatttacaaagtctctgatcaatgatttggtatctgtatcctccaattatcatactatatttatttcattacactaaaaattgattgatatttgttttctctgtttcatgaaaattttggataagttgtattttagagggtaatcactaatcaatattactggatatattcatttcagacatttgaagaagaaaattgaagatcttttagtattaaagttatgcattgtcagcataaactaccaattaaacaaaaatcatcgtttatatgacttttaagataactattataaaattcaacaaacttactatacatgacaatctttaattccataacgaagtaaataaatctctactgccagagcattctaattaaattccaagattataatatagtttatttatgaccatgttaaagatttgtaaggaagcttattaattatgtgcttgtgaaataatgttgtgaataatgcccaattataaactaagtttagtggtgaatgcatgcagcttccttggggaaaatagagtaccaagtgaatgaccagggaaacttatccttgtaagattaactcagaagtgtacctaatttatgtgatgtgggtggtcataacaatttctaggttgtaatctgtttgttctgttgtattgttcagccccttaactaattatacaatgtgaaaagtgtcaaaattccaaaagtggggtcgtggtcctaccttaagcagcatgcatctcaagttactagtagtttataacaattttcattgtatattactagtagtttaaagaaatcttaatttgtcagagtttctgtcttttaatttctgttttttaatttcttacctcaagaaatgttacagtttctgttttttaatttcttgccttttgttggtttgtctatttagatggatgatctaggagaggagagaaatcttgcattgtttaaatggagagaaagacgtcgaatggctattgttcatgtcatatgccttgtagtttattactacatgattagaatttgttctcaaagtaggatagttgatcatacgttgattttagagaaagagagagcacgagaaaaaataatgaagtgaattgctagtagtgaaggtcgtaagataataagaatggggcctagagcctttttggacttgtgtgcaatgttagaactagatggtggcctccaatcaacccaacgggtaagtatagaggaacaagttgcaaaaaccctctatattctaacacataatgttagaaatcgtgaggttcaattctggtttcgacgctctggtgagaccacaagtcggcattttcatcgtgtgcttcgatcaatagtggagttagaagacaaatatctcaaacaaccagatgggtcaaacattcctatagaaattcttggaagtaatcggtttaacccattttttaaggtaaaaaaattgttttcataatttgatttaaaaacatgtttagttaaaaatatattgatgatattataacaattctaggattgtgtcggggcaattgattgtacacatgttcgtgtcaaagtgccattgaatgaagcctcaaaatatcatggtagaaaagactttccaacacaaaatgttttggttgcttgttcatttgacctaagatttacttatgttctgcctggatgggagggcactgcttctgattcaaggatattaaaagatgcattccacagaatagattatcttagaatacctagaggtaattagtggattttttgtttttaatgttcctcttgtttcattagatatatcttagcaatatttttttaataggtaaatattatgtccttgatgttggattcatgttgagaaaggggctgatcacaccttatagatcaacacgttatcacttgaaagaattttcctcaagaaatccacctagaacgcctcaagaattatttaaccatcgtcattcatccttgcgtaatgttgttgaaagggcctttggagttctaaaaaaaaggtttcctattattgctagtggcacagaaccaacttatggaatcaagacacaaaacaagattatcatagcatgttgcattttacacaattatttgatgatgacagacccggacgaagagttggttgctgaggtggatgaagatattgccaaccaaagcgtatctgaacaatatggagatgaccacatagatgaggatgaggatgaagaacatactcgtttaggagaaaatttgagaaattctatagcagatgctatgtggagagcttatagacaatgatttgtttctttcttatgtttgagattattatgtattttttgacttcttaatgaattacgtgcatgttggtggtttagtgctcttggttttgaagtacatgtagttctttaatttgatttgctatgtgattttgggtttatgttattatttagctagcttatgtgcatcaagtcttcttctgtttattttgaaaaaaatataattgttgtcaaaatatatatatgacttacaataggaatcatgtctgagtcggagactaagcgagagacatggacacaagagatggatgatgttcttgttgatgcttttttgtatcaacaaaatgatggaaagaaagttggtggctcctttacttcccaagcttatgaagccatcataaaggagttgcaacaaaaatttggacgcccttttgagaaagaaaaggtgaagagtcgttggaaattgataaagaggcgtttttccaagtgttatgacttgttcaagaatggcttgagtggatttgcttgggacccaattacaaaacaatggtgtgctgagcctgaagtttggcaaaagttaattgaggtatattatgaacttgacatttagcttattgattgcttgtttctctatcatatgaattttgggtgtgttaaatttgttaacaatttgtattatatttttaaaatttatctttaaaaataactacccaattcacattttataggctgatttactttgatcagatttactttttaaccatcacatgcaatattattatattagctgttattaggagctgctaattaatatgtcagaacattgatttagatggctcctcattttcttttctttcttcttgaaaacttgctcaccattgttcaataattattattttataggctaagcctgaagtaaaagagtggatgggaaagcctatccataactatgacaagttaatgatcgtgtgtggaggagatagagccactggacaacattctgagactgcaaaagacattagaaacaaaaggtcattgactggagaatctgagtccacagaaacaattgaggtgacctttgagagtgctcaagaggttggcaatgaaaatgaagtgacgtcacctgaagtacaagaaattcgcagtcaagaggttaaatctaaaaaggctaaaaggtcaaaggatgaagaagttgaagggataaaattggcgcttcatgatattgctggagctcttagagagggtaatgctgtttatgagaaagttaagcaaaaactgccaattcctgaagctgaaatttggaaacttctggaggatttgaagattgagagacaagtatttactcgtgcatatctttatcttcttgataatcctgagaggattagagcagtgattggttgtcctctagacaaacgcaaggagttgctacttgagatggtgcttggtcctgttggtccttcgaggtataggcctttattgaacaatggtttttatctatattcattttaatttttttaatagatcaatcccagtgaaacattaattacacttctatttgtgcaggtaatggcatatataacaatggctgccgggcaatcaactgtgtttgcaaaactgggctagccataattacagtggatgaagatatgcaacatgtatgggaaattttgcaaccaagtgggagaagggatagctagtgcttttgtagttagccttattatagtggtcctgtcttgtcttgtttttctgctttcagtcttttccgtttgtatgggggtaacaaaaaatagacaggcatgtctgctatgttactgatatagttcttaataattgatggcgctaaatttgaaacttatttaacatatttaactactttggcatgctgtatgttcaatctattataattttaaaattatgtagataacatttctgttatgcatatcctttgtttgtgctgcatttttaattttttataattttaattcaaatataatgtgacgtagagaattttagagtaagaaaaataatttttagagagaaaataattttaaatggagaattgattttaaatgtgaaaattatataattttttaatttaaaattaagttttatttgtaaaatatagagtgtattaattttttataattttaattcaaatataatgtgacgtagagaattttaaagtaagaaaaataatttttagagagaaaataattttaaatggagaattgattttaaatttgaaaaatatataattttttaatttaaaattaaattttatttgtaaaatatagagtgtattaattttttataattttaattcaaatataatgtgacgtagagaattttaaagtaagaaaaataatttttagagagaaaataattttaaatggagaattaattttaaatgtgaaaaatatataattttttaatttaaaattaagttttatttgtaaatatagagtgtattaatttttgaagtaagggcaaaattataaaagtatctcattaactctccatttcccttctctcataaatttttaactcccaaacaaggaggaaggattttctctcattttcctccctttccttcccctcccttccccttgaatatctttccttcccttcccctcctaactcccaaacaaagcctcagggtacaacaaaatacaaaaccaaagtctaaatacaaagcatcagagcacaagctcatgttctctagcctaaggtgtccatcagcagctaatcctgcataggcttcttgccttgggatctctctgctactctggaagaatcacctgcaaaacatagccccacacaaggggtgagatataaaatctcagtaaactcagggcccttgaaggtatttccttcccctggttactgaccacacatatatatatatatatatatcaaccacaatcacaatcattatcagtgaatcactaaatcattcatcatgcacaatacacctgaccacaatcaggctatacacattcatcagccaaaaccaaggcatactcatggcattaagccatttatcacatcaataactgccatgcagaggctacatctaagtatataggaacatctcctcacagggaggctacctctatatactcggcacatctctatctcgaggcttcgtctatatatcaggcacatccccttttggtgaggctacctctgtgtacataggaacatctcttatcacgaggctacctctatgtatcacagggccatctcatcctctaacacaatacaattgcctggggaggctacctctgtgtatatgggaacatctccacgtaggaggctacctccatatcacaggctcatctctcaccaagtcttactcaatctcaaatcatctatcctacgacaataggatgttattcaagcacaacatgcataatcaggtttcacatttaaccagacatgccacaattccagtagatatatggtggaacgcagcagaggatacacaaacaagaaccaagagcttacctgctctagacagatcaccggctctcccggcctcgtggtcaacaccaccagagctctcacgctcacgtcctacacaagaacaagtatataacatatcagatacggttctagaccgttcaagcgaaagggaactctcatccttcctataaacataaactaatcactgtacaagtgatcatctgatcctcaacaggatccctctcagcctatatcaggctataaagtctcccttaagactctgatcaagctataatcaagcatagctctgcttacaatagcctaaaaccaacttctcattatcatcagtttctactcacaaatatcatctatatagtctcatgagcaactttgtcaactgctctaaggtccagactagtcaaatagtcaaccttttatctctgctcatactgactcagagccaaaatcaaacttcatcagtaatgatgattcaaggctctaaattcatcagaacagtcctctgagcataagactctacagagtccgagcctaataacggctctaacacctccaacaacacccctcaagataaccccaaaaccccgaaatccaatacacagaaccaacggttagagctcgagtttcttacctctgtgaagtccagaaacaccagggaatcactttccctaaggtaactcgctcaatcaaggcctctttcgcctctgggtttcaagctctcaggggttctctcagaaaatcaatctcactgtttctcgctcttcctcgagaatcaatcggggtttttctctcctctcggggctctgatcactttctcagttgggtcagaggtgtttagatgaaagatggagaagatacgaaactctcaaactcatcaatggaggtttggacgaaggaggaagaagaaaggaagaaaaatatcaagattttcgagcttctgggccttttataggcctctgccgtgactcccatgctccaagcgtgggctcccacgccccaagcgtggactggcagacaaaatggcatttctgggctacttcccacgccccaggcgtggcctcccacgctccaggcgtggcactccagtgaaaatcaactttctggagcacttcccacgctccaggcgtggcctcccacgctccaggcgtggcctcccacgcttcaggcgtggcatgcagaatttggctatgtacccccggtaatacataggcttgttggcgcagtaccttctgttctgtttaatctggcttaatctaagcttctaagcttgattatgatctaatctcaggcttaatcacatgtttaaactcccaggcattacatcaggctcaatataaagtaaagtgtgtcagaattcatcaaacacaaacaagcacacataaatagtcacactcaaagtacacaaatcataaggggaatggactgactatgctttcgagcatggtgtaccttccactttgatttctgatagagacccccgctttacttctaggttttggggagcattacaaaaagcatttgggaccaagttatgcttaagtacttcttatcatccccaaatagatggacaaatcgaaagaaccatacaaatcctagaagagatgttgagagcttgtgcgatagaccaacaaggttcttgggataaatatttgccattagcagagtttgcctataataatagttatcatacaagtataggaatggctccatttgaagttctgtatggtaggaaatgtcaatctcctttatgttggcatgaatctggggaagcaagtcttttgggtctagactgggtaactcaaaccacggagcagatcaagaagattagagaaaaattggtaatagctcaaaataggcaaaaacattatgctgataaaagaagaaaatctctagaatttcaagaaggagaacatgtttttcttaaagtcactccaattacaggaataggatgagcgatgaaggtcaagaagttgagtcctcgttttataggtcatttccaaattttgaaaagaataagaacagtagcttatcaaatagctttagcaccaaatctcttcaaccttcataatgtttttcatgtctctcaacttcgtaaatatatttctgaccgagtcatgttctagagtctgaatcaatacagttaaaagaaaatttaactatgagcttgcccccgagaagaattttggatagggaaataaagcaattaagaaaagtctgtgtcactggtaaaagtagcatggggacaatgacgcttagaagaatgtacctgggagttagaataagaaatgaggaagacatatcctgaactatttacaggtatttacaaactttgagggaaaaatttttctttttagaggggaagaaatgtaacatcctcaaaattaattcatatttatgattgaattgtggaaatgtgatgatacttgaatatgaaaatcataggataaaaaatttatgaaagctgtccacattcaaaaaacagtttctgccacccgaattgagaaatttatttctctctcaattcttatccaaatttagtgtataatatatggaattaaagatctagatgtctactacaacatatcaaaatttcagataaatatagtttgtgtactgattttagtaattaaaaccttaagagatgtcagtatggaatttctcagcttgatggcagttttgaagtctaaattaaaaaggttatagccagagttttataactccaaatcaagcatgtgataccttgttggaaagcttaggaagtctagtttaacatactagaaaatgagaatttttggactagtagaatggtacagaataaacaaaccatgtgccgtgaaacatttttttagaaagatctagtcttggcaatttgtagctcctaaaactttgacacaaaggctagaagtttcagctaaaaattagaccattcataagtggaacaaaaaaaggtacctttccacgtgcacatggaacattaaataagggaatcttgcactaaaacaataagccaaaagaaaaatcatgaaggtgtagctgctgtaattttttaatgttcccgatgtggaaagacaggacatttggcaaaggattgtcgcagtcacaataatgttcaatgttttagatgtggaaagatggggcattatgctaacaattgcagagctgaaaatccccaaggcaccacacgtccttagcttattggaagggtttttaccatgaatgcagcaaaggcatctcaatctgaaaatctcatagagggtaagtgtagaattaaagataaaattttaactgtattatatgattcaggtgctaatcactctttcatttcttatgacactgctatacaattaggattacctttatttcaattaccttatgatctcttagtttctactcctactggtaaatctattactactagtcaaatctgtcttaattgtgattttcaaattgatcataaatctttttctgcaaatttgatttgtcttcctttgactgggtttagtgtgattttgggtatagattggcttgaagctaaccatgtgttgttggactgttcaaataaaaccattgttttaccttcagaaatttcagaaaatagtcaaacccagtgtctgtatttgaactccattgtttcctattccaataaaaatgaaattcaagggtatgttcttttatcatctaatgtaactgagtcaactgatgaactatctaatatacccgtggtaagagaatatttggatgtatttccggatgagataccaagaataccaccaaaaagggaaatagagttttctattgacctaattcctggatctggaccaatatccatggcaccttataggatgtcccctctagagttagaagaattgaaaaagcaattagaggagttgttgcagaagaaatttattagacttagtgtttcaccctggggagctccagttttgttagtgaaaaagaaagatgggggaatgaggctttgtgtagattatagacagcttaataagataaccattaagaataaatatccattgcctaggatagatgatcttatggaccagctgagaggagcaacaatattttctaagattaatcttaggtcagaatatcatcagattagggttaagaatgaagatattcctaaaactgcatttaggactagatatgggcattatgagtatttagtgatgtcttttggattaactaatgctccagcaatttttatggattacatgaatagaatatttagatcatatctagataagtttttagtggtctttatagatgatatacttgtttattcaaaattagaaagagcatgaaaagcatcttagaatagtattacaaacacttagagaaaagaagttgtatgctaaattatctaagtgtgaattttgggccaaggaagtgaaatttttaggtcatgttgtttctaaggaaggaatttcagttgatcgtaataagattgaatcagttatgaactgggagagaccaaccacagtaactgaggttagaagttttctaggattgactggttattataggaggtttattaaagggttttcacaaatagctttacctttgactagcttgactaggaaaaatgtgccttttgaatggtcacctgagtgtgagaaaagttttctagaattaagaagattgactagtactccagtgttagtgttgccatatcctcatcgtgcatttgaagtatattgtgatgcttcaaagaaaggtctaggttgtgaactgatgcaaaatgagaatgtggtagtatatgcatctagacaattaagaccccatgaaggcaatttaaatatgttagttagagataaaaaagagaagttacaaaaaaattcttaaaggagaatgccatattactctttcccttgatatgagaattaccatattacccttgaggtggaaaattacaaaaatgcccctgaagtaagtgacaaattaccaaaatgcctttggatattttgattggatattttaaagtggaaattacaataatacccctgaggggagtatcaaactaccaaaatacccttagatattttgtagagacttgaagaaattacagaaataccctgggatgacaaattaccaaattacccttagtaacagataaatatcataagaaaactaggagtacctagattagtcgaaaaatttatgatcaggtaagtcaaaagataagtctctaaattttactacctaatttaataatacaagtaaataaacattacaataaaaatgaaagaaaatttcatgaatatttaaaactatcatgagctatagtttcaaagcatgtgataatgtgatgagaaaaactatcatatgagaaacacttgtggtggtagtatgatacaagaagaatatgatagaagctaatggattcaagtgacaagtttagaagtgcttagaatatatttagttaggattagttaatttaagaaaagaaaccaatcctagctgtgtaggattttgggcaaaggcttaagattttaaatgtatgtcaaatacttagctagtatatgaattggaagacacatgaagtacactatatataaattaaaagaaacaaaaaataagaccaagcaagtcgtgagatttaaagctatatttaagtgaaaccatgtgtaggttaacgtgtaagctctagaactttgtataaaagataattttgcaaccaagcttaggaaaaatcagatttggcttcttgaaaactccattccacattcacatagccatttaatgaaggaatctttcttctttcttagtaagcatgcatttaatgcataaaattaaaatatctttaggtcatgattacttagttactttagaaccaaaccaaggactaagtaagttacatcctaactaatttctttacttcctaaccaaaatgttttctataaatacccccttgaattaaaattctgcagaaggcatgctattcccctcaaacttacaggccaattgcattttctcttttcactttgctttctcacttccttcttgatatagaaacatagtccttcacttctattgccttcttcacctttccaaagcatcaaatactagacaagcctttcattctttcaataacttgaggtgcagccaaatacttggaggaattggaagcaaacttgtttgaggtaggtgaaagtttaggtttatttatcacttgattcttaagattatttgaatagtattttggtatatcttagtcttaagcttgatggcatgtgaaagtttagtatcttgctttcttgaagatcttctatacaactttgattcaagagatgattgaaatagttcaagtaacatcaaggtaggtgtaggaataagcttctagtgagtattgatattgaagctcgaatggctttgagctgaatttggtctgtctttaaaatttgatatctccctatgtacttaaccaaacgagatgtttgaccactcattttgaagcttaggatgtcctctatgttttcataaaatatgggaccaaactaagtagtgaatgatgcccaggaattattttagctcaagctgtccgaaactgtccacacccaaatagcttctgccatctgttttgataaatttatttatctcttatttcttatttaaattaggtgtaggatatatggaattagagatctaaatgtcaaatataaggtataaaaatttcagctaaaattagattgtttactgcttgcaatcgtcaaaacactaggagatgttagtgtggaattttgagactgctggcagatttgaagttctatttatgaaatattatatctagagttttataattccaattgaggcatgtgatatctttttagaaagcttaagaagtccagtttaacatactaaaagatgagaatttaatgacagttagatgagtatagattataggaagaaccgaatcatatgtagtaagaaatcttgtggttatgatgttctttgttatgattttcttttgtgatgatgaaatcttgatgttttgtggcataattgtataacatgagttatgtagctttgcatctcatgtgcattaagaaatataaaaagataagacctaaaaggtgatacggttaagtctagcacgaccctgatggtgccccaagggtgatacagttaagccgagcacgaccctcagccaaagactaaagaaagataatacgtgaagggtgatacaattaagctgagcacgaccctgatggtacccaacgggtgatacggttaagccgagcacgaccctgtagaaaagacatattgacctaagggtgatacagttaagctgagcacgaccctatgggaccccaaaaggtgatacagtggagctgaacactaccctgcgggagcaacctaagtctagtaatgagctcattgtctagtttagggtattaaagagtaaaataataaaggtaagctatgcattgtgtgataaccctaagtcccagcgtgtatggcgcaagtctaggcgcgaacggcgctgaattctgcagaaaaccttctgcagaactgtggccctcttggcgccaggttggcgcggatgacgccacagcttctggagtacggcgctgatggcgcgggagtggcgctcccagcgccatggtctctggtggttggcgtctggggcgccaggctggcgcgggtggcgccagaccacccagaagacctgttcttctttccagttggcgcgagtggcgccattgtggcgcggttagtgccagagtctctggatattggcgctcttggcgtgggttctggcattggaggcgccatagtccctggatgatggcgctcttggcgccagaagttctggaggttggcgctctgggcgcggggttgacgcagatggctctgtggtcacttgcagctggcgtgatcagtgccagagtcgcgcgatcagcgcgacagatctgacatgaccactataaaaggctggggtcgcgattttgggagagaaaacatttccttcttcttcctccagcaccccacctccattgttgaacctccaagcttcatttcttcaccatagtttaccaaaatacatcccttaaacacattttgtgatggaaatcacttctagagcttgaatccttcctcatttctccttgaaaaccccaaatcaaagaacccctttttcaaaggaagttcgtagaacttgagttcggcaaggaacggtgacgattcgtggttacccaagctaggggaagtcgtccttaggccttccttgtcatctttgaggtaagaaactcgagattcactgcttgatttgtgagttggggttttgggtgaatagtgatccacttttgatagagctagttttagccttgggtcccgttgaaacatgtgtttagaatgttatgaggatgtaggattagctcttaaatgtgagtttggtgaactttgattttcttggctcttgtgaagcatgttattgataggctgagttgcttggctatgtgtggacatgctagagccttggtttgtggcttagatagccttgagaggctagtggaacggtgtcttgtgtgatgagagtaccgttcaagccatgtgtaagccttgagcctttgggctagtgtggagctttgagctcttgatattggctgcaccgagtcttgtgaggactcaagtgccttgtgggcatgaggtagaccttgggagtctatgctttggcttggatggttgagctttgatgaaccttaggttagatgaccttatggtttaaaaaggattgtgattcctttcatgtgagcggttgtgaaccgtgttatgttttgatgccttgtgtggctatatggatgtttgatgtatgcttatgtgccttatttagtgcgtgacactgcgggtgtcagtggcgtgggccacagagcaagggaagaaccgcagagctcagctttgccaggtaagttcttggacccttggggatgtttcccacttgcttgtgctccaccatactccgagggagtagtggttacattcatgatacatgcattattggatgttgcatactcatgatgatatatgcttgtatctgtgcttgagacatgtatgaagcctgttattagatcttctggtcagccagttagatatatatggacctccctaggagtagagcgcacctcctagtttggtttgctcatggttgattggatcctggggtgatgatgatcccctaaaaccaagagatagatgtgtcccgtcgtggttgattgcctattctcggaggtaccatatatgtgcgtccatgcgtaaggggtagctcccaatgggatggcacgggtgtgaattctggtttcacactgaggtcggcgttgactcggtccgccgtacttagagctagatacattgattgtattgttatgagggtcaggaggccaggccgggaggcccagttggttgtgataccctgatgacttgtgtcatgatgagtgagccaaggtggaggagatgcctccaaggaccctaagcttactgagatgtttatctcaccccgtgtggggcttatgttctttcaggtgatgcttctggtagagaggagcggtctcagggcgggaggccccagtagagacagtacctgctagtctgagaggcagcagcggagagcttggagctcggctcaacttttgtggtgttttgtgcccttgtagagggaagacatgtgtgtgcacatgtggccttttgagttgtattttgtacatgttatgtatgccctctggtgaggaaggatcctagggatcagaaagcgctcggacgcttattcttttgtagacacttcgagtgttaaactttggatattgtacataaccagttctgttatgtaaatattgatgtttcctcctgtgtatatctttgagatatttatgttatctgcctatggtttggttgtatgatctggttcagcaggggcttggcttatgctttgtgatgggttgcttttgtattccatacataatgtaatcaagagatatggtttttgttttatgcttccgctaaacatgttttaattaagtgattaagcgctaatctggtataatcataatgataatacaccgggtgcacacggggtgttacacattgacatgattgaaaatgatacttgcattaatgatgaagtatgatattatttttaagtatttgtgaataaaatgaatctacttcgggttatatgtttatgaaattaaaaatcaactataattgttcacatgttttcttaataaaccgaagtagctggaatgatgacgatgacactatatgataagaaaattttcacctactggaaattctttggaattctcactgttttagtatgttcccttgtcatttcagacagataaatcgaaaggaggagctacaaagtgaggacaagttggaagatttcttttaatattgtggacttgtagtactttgttatatgctttgtaatatatggacattactattattgtagggaatattatttacaagttattactaagttgtaatttattaaagagaccaaaaagtctctacaggctcaatataagcgtaattttcataacacagttaaatttgaaatattgagacaagtttttcttaattggatatggttaaaaattttacgttagaaaagttaacatcttctagttacgtattatgacctaggcataatatagtaattggaaggatgctacacctgacaaattcgtcctggaaagatgaaaatttcaattttagtccttgaaagtgaaaaaatgcaacaaatctattcattcgttaactttcgtccattaccattaatgaaagagtttacgtggcacagagagacaagaatgtcacaaaatgattgtcaacatggttgtagaataggttggatcaaaatgtcagcgaattttcatttgaccaaaatattagtaagtttccattggacaaatttgtcatatcccaagtttcatttaatttaagggtaaaatgcaatttaggataaatagtcattttcgtccctgtatgtatagagtgctgacaaattcgttttgagatatgagaattcaaattttagtgtacccatttacatgcattgcaaatttgctacaactatttgtttgttttatcagatcattggcacattattggaacataatagtacataggatatttttgtccaatagaaacttaacgacattttggtccaatggaaacttactaacattttagtctattctattcatcaactatgttgataatcatttttgtgacagttttgtccctttgtgtcatgtaggatctttcattaacagtaacagatgaatgaatttgtcgcaattttttcacttttggggactaaaatttgaattttcatctttcgaggacgaatttgttagtgctttacgcattcagagatgaaaatgactatttacactaacacaatattattaaatgtctgaaagtagtaaaattgattcatttaataccattagcctaatattctaaaatagattaatacaaataaaaataaaatattctttaaggagatttactataatagtttaaatcactactatttcctacaaactaatttcttgcaataaacttttttgcaaccaaatttattacaactagatttgttgaaataaataaacaaaatatgatccgttaaaattataaacatttgcagttccaacacttggactccaatattagcattatttaaaacccaaccaaacatctctaaaatttttgattggttttgatcgattttgataagatctatagatctaaacccatgacccaacccgtacatgaatggttttgattgatttagttcgattttgactcaaatacatatatgacccaacccaaactgttcggatcgatttgggtcaattcaggttcatgggtgactcgtacccgtgaacacccctacttgtctcaaattgtggtttgtcttcaatctgcattgtgatggtggcatggcagtttcattttttctttttactccatcaattcctaaatagaggaatttttcaactaattgaaatcacttgaaaaagtgaataatttaattaatcacattaaacatcataattatttatactattatctaaaaattatcattttttatttatctatatatttaattgttcttattaatatttagagagaggataattaaataaagatgttcaagaaaaaaataattaatgtatttcaaaattcaaaattttgtcttataaaagggataaataaatttttaaaaggatcttataattatggatgaatgaagtatttgttttacaaaagactttaaatatatttttactctttaatgaatactcaatttttgtgtttgttctttgataaatttttgtttcgcattgagttttcaataaaacaatgttatttttggttcttcatattttgttttagtcttttataaattatgaattttgtgtttgatccctaataaattaacgaattttattttagtactgattaattataaatgaaaaaatataaaaaaaaaatacaaaatctgttaatttatcaagaacaaaaaaaaacttaggactaaaaataaaattattatttattagaaactcaacacaaaataataatttattataaaaaggtaaaaatcaaatatttattgggagtaaatttatgtctttataaaattaggatgtccttagtgatcaaatatttataaaatttatgtctttataatatttattaggagtaaatattctatagaacagctgttagaccgataatgctttatggagcggaatgctggccagcacataggcaacatgagcataaaataggggtagcagaaatgaggatattaaggtggatgtgcggatatacgaagatggataagataagaaatgaggatattcgacgaaaggtatcagtggtaccagtatatgaaaagatgagggagcatagattgagatgatttgggcatgttatgagacggccattagatgctcctgtcagaacaagagtctgttaccaagagctagatacaaagagaggtagaggttgaccaaaacttacctggggaaaggtagttaaacaagacctaatggagtgggatatagattggcggatggtatgtcttaggacggagtggagaaaagctataagtctggtggagggttaaaccctttagtagttctatgttccagttgttcccttgttttagtttttttcttcttcttttcttttctcctctcaccattcttttattttaactttgtttctctcttttgttccattttcgatttatcattgagttcatctaccaccgaccccaattaatttgggttaaaggtgctgttgatgttgataaaattaggatgtctcgttgttcctcaattaagttaaacaattccaaaattgggcttctttttttattaaataagttaaattaatatattttttaaaattttatttcattataaaatataacactataagttattttaaaaaaataagtttgacaaattttaaataaataaaaatattattattattatgcttattaaaaaatcttattattgcttttgtacagtattttattgtaatatttttaaaattaaattaaatgttttattcctctaactttaattttttatttatttcatatcataaggatgttacaattgtaaatataaatgtgcctatactttcagagcgtatacagacactttttttttattgaagatttttttaaaatattatagtcagggtcttattttcttttgtataactttgaagcatacttatgagacttgatctttgagctacttataaaattaatctttatttaaaatttaatcacacttaaaattctttatttctcctcaatgatatatgctttggatatcaaacccatttgttgaagaattttttatcatttgtatctagatcaaacccattatttggaagttaatgcaatttaattttctagaactttgtgtggggtctcactagatcttagtttatttaatgtgttaaattatgattctaataattgaaaatatgtttcaaataataataaaatggattagatgagttttagaatggatatagagttaaatatgggttcttgaactaaaataaaatatataactaataatcgagcatgcggatcaactaatatgaaattgttctatctcaaccagaattctcaaattcaagtcttggatatatgttaaatatttaaaaggagaacattatcattcataataatcctattttattaagacataattttcttcacataagggtacctatggcgtgtataaaaaaattgcttacaattaacattttactcgttcaattaatttgaaaaagttaaaacgtgtgtttggaaacatgttattaatccaaaaaattgtgaaatatgtgaaaaaagtactgaaacaagtagtagcttttgtagagacatgacttatacgaaggaaaattaattcctaaatccttatggtgtaaatcatcactcaataaaaccctagaaacatcatattgaatcatcaagaaatcttatacaaataatgtgtacatgtttccatggtggtagtgatttatctttaatcttttagcctttagtctttctttatgagctttagtctttctcaatcaaattagttcttagagagtattctctctagatgggaaagaaagaaaagaaacttgatctgacatattggggaccacaatcctatatatagtgtttattattgggccagtaagctcccattaaacctaattggcctaacaatggtatccattcatttatccgatatttacttaataatctatttgagtatatttaattgaccactttaatttaccaaatatacattaaatagtataatataattatattaatacaatatgtagtacaaagtaacgtcaacaaatttaatttcctaacattataatgtcaaacaagtttctcatgtaatttcaaaacatgctataaattggactagtttttaaaatttctttaagaaaccaatctactctcatcttgagttgatgtcacttcctctattattcttttgtttcaatttagtttttaatcaattatggtattttttatcaactgttaaatttttttaacaagagaatcaattaaaaaaaagaatccaaatacagctaaaaaaattagaagatcaaaccaaaataaaacttttattttaaatgtatatattagttagcctgtttaaagactttagtcgattgactaaatataagtttaagacaagaggtaggtttatatgcttatctaaaaaaatattataaataatttttcacgtcacgctagaaaagggaaataaaaaaatataagaaaaacattgaattatgttttcaaatctttttggctaattacaacaaaaaaaatacataattgtagataagctgaaaattttggccttttgggtaaacaatcttgcactttgccaatctctaaagaagtaaaaaaaaaaaaacatagtatcattttgctaagttttaatgtagataaatcactactagctcaattaatcattattcggatctaacacaaatctatccattcataaatcatttaataaggaagtctaacttattagttattttataaaaaaatgtcttccacattttagtaaaaaaattgtaaaataaatttaatatttatacaaattttatctcaacactaaaatccaagacccaaatcataaaaagaactatgcctaaaaacttaaaaatggattttaaacttctatgaacttacacattgcattggatgattcattacccaataataaatgatgatccattacttaatctattagtttaattattagattgatttgtagaatccatctctgaacacacaccacattgaccaaccggttttctgccaatcataagtcagcacgccacctaaccgtaagtagctcattcgtgttccacccaaaaacaaaactacttgtttaaaattaatttaaataagtccacttagccaactcatgggtagaaatgtgtaaaaaatgtcttcaaaaaaagtcttggtactctaccaaagtcttcgaagactttgaaggttcataaacccaagctctggtaggccatcaaggcttataatcccaagtcttggtagacctcggaaacccaagacaagctcctggtactctaaatggttcataattcccgttgtggggtagaccttgctcaagacccaaagtaaatccttggaagaagattcgtaattcccattacgggttaaaaagttcgtaattcctgttgaggggtagaccttatcaaagtccaaggcccaaggtaaatccttggaagaagattcgtaattcccattacggggtagatcttaaaaggttcgtaattcccattacggggtagaccttaaaaggttcgtaattctcgttgaggggtagaccttatcaaaagtccaaaacccagggtaaatccttggaagaagattcataattcccattatggggtagatcttaaaaggtttgtaattcctgttgtggggtaggccttatcaaagaccaaaagaacaggttcataaacccaagctttggtagactgtcaagattcataaacctaagcattggtctacttctaaaaacccaggacagacgcgtcactggtacatctacaacgacacagagaacccacgatcagctctttgaacaaccaaccaagaccacatctgggtaaatctctacaaaatccagcatggactatgtctaccctcagcatatgttgttgttatcatattatgtcattgcaggaacaaaagttctcaaaaacataaagaccaagatgtatacttggcacaaagaccaggcaccttaggtctcctaaaaccaagaaaactctcttggtatcattatacactatggaatcctaacatggaaaatcatagcagtcagcagatgttgataagaattaacattgacccacatagtttatcaacaactcttggtaacctgtaactctcaaaacttgagatcagtttgcggtcaatctcattttcaccgacttatccactaaggaaacacgaggtattccaagctttactttgatgatttcagtgctcataaattctattgatgtaggaatatgagccataaagaaacatcttttatgtaaatgtccaaggtcatcttggcatgataaacccgaaaaatattttgggtactctaactcctatgaaacctcgacatgcagtaccataggaccattttattttgtaggaatatttgtctaaggtccaccttgacatatcagcaacacttggcgcatatggtgggaacctcgacaaaagagtccaccctcgacaatgcaaattcaagaaacaatcttgaagtccatggtcaacccttgacatttccaaagcctaagatacactcttaacacatactggaagcgggaaccttgacaagcaagactacaaacttagtcacttgcgaacacaggaatccagcaatagtacaagaatcagcttgacactacaaacccaagttatattcttggcaaatcattggctcacaagtctcagcaagcaaaataggacattttcaattacagggcctcaatgtttatgaataaacacaagtcaaggagatcatgggttaccaacgcaggagaaatcagatcagaagatagcatacaaacaaaaaaagacacagaagattcaaagcaaaaggagtattttcattaaaattgttaaagctttacaatgccttcacagccaaaaagcaaagacaaaatcaacagaagcataaataaaagcagcctaaacatcagctgcatcactagctgtctcctcagcagaaccaagctcttcctcatcaaccaaggcaccatccttcacatccttgaagggatcaaactgactcaagtcaaggtccttggcaaagagcctagcttggcgtaccaccttgaagaagcctttctcgtgttgctccactgcttctcgcttgaaaatcctcaactcctcatcaagctctttgctgacagtcattttagtagaaagcttaatatgagcttccttcagcctttcctctaggcttgccatcttctccgccagctcaatctcggcagcaagtccatccttggcatcttttaacttcatctccaactcggccacctttttcgccagctcatctttctcattcacagctttagcaataactaacatgccatgagtgatcagttcatcaccatcaagctgagtccgtaacaacttggacaaaacttcactagtcttcatagacaattgatggttacacttaatcatttcaactagtgccactacaaccttgttcaacctattgcgctccaattgcaaggcaccacgaatagtgcccttcagcttgttgtgttcctgttccaaggaagcagccttgctcatagcctcttgatgcacttgtcgatgttcttttatgaaggcaaggcccatatgcaaaaaaagttcagcgacatcaagtgaacgatggatacctaccgacctaatcaagttcctatcaaagggggtcggtagccctcgatcaagcctgtgctcaacactgcacaaagagtcaacatccctaggagcacttaaaaactctaggggagtgacagaacgagcaacaagtggtggcattgcagacaaaggaggcgaggaaggagaaagagtagcaaaagcaagaggagctggctgagaagcaggtgaagtaagagcggcagcaatgtgaggagcagtaggaggagcactgacagcaacaggcgccggagcctgaacaggtaccggagcccggacaggcgcaagagcctggacaggtgccggagcccgaacatgtgtatgagctcggacaggagaaggagaagtaggcagaagcccgacagcctcctgttgatttgagggggagctacatgaagattcaagtgaagaatcaagtaacaataaggcttgaatgttttggctttcaacatggctcaaagaatgaagattgaagcttgtgatttaatgtaaaaggaaagaaagcactatggtgatccaagctttgaatacatatcattcatatatcatacaagcattgcatcgtattgattttaagtaattgatttgaaacttaagaaaaagccaagtattttggaaaaaacagcctagtactgctttaatcgattactgcctcaagtgaatcgattattttgttcataagctttctggaaaatcaaacatgaacactttaatcgattactacatcggattaatcgattacatgaatcttaacatacttagaaattagccttgtaactggtttaatcgattactatagtatcataatcgattacatgcttgtttggaaaatacagtcactctggcttgatcgattaccactgactgcaatcgattatttagttcaaatcatgttttgcactcacactggcttaatcgattaccaagggatgtaatcgatcatctttcataaacatcatttgtacataggtctggcttaatcgattactgcagaccgtaatcgattattttacataaacacatttttgctcagtctggtttaatcgattacgtgacgggttaatcgattatttgacctgtttgctgaactcctgagcataccaaaggtcggtttaatcaattacaggagcgtggggagcgtttttaatcgattaattccgttacgaaaattactataaattgaacccttgcctcttgtgatctacaaccaacagagattgagattgaacttaaacttttcgatattctgagcattctaagtattcacaaaggaaatattctgggttcattgagtcttgcttccattgattcattcatgggtcactaaggtgttagtgaaggaagcttgttctgtcacaaaggcataggaaagcacttatgcataattggtttgcattcaacctgaggtttttcattcatatgcatttcattcttggatcatcaggtgaattctttcctagctctttgtgaatgtttagttttctgcaataactttgtaattgttgactttattgtaagaaggttttcttgcaagtggagacagtgtttctccaagtggagataaggtttctccaaggacagctgagtagtgttctcagtgtgggtgtggcttctaaggatctaatagagttttagatatctgaatttcatctagggttgatgaagagaagcttgtaattacttgtaaggataatatttgcaatagtggaactctactctagagttgagtagaagaaactggatgtagcctcataggttttgaggtgaaccagtataaatcttgtgttgtgatttaaattctgcagatttaactatatttgtgtgaactctgttttgcatgtgtgttcttgtggcataacaagtcttggattaattttgtgataaagattattgtttgattttgtgataaagatccaaagggcaataaaactctgatttgaaactctgattttcatcaaagaaattttaatttaccaagactaaccaattcacccccccccctcttggttaagtgtgaagtgttccttattttccacacctccctcatggcacgcaagctatgagaagcataagctgccagagacttcttatgcccagatgtcccaggaccctcatctctttccgtcgttggcaactcagaaggagaggggctggggaaagcagcaataacttcagcaggatcaacccggacagtgggtcgacccccttcttcagctgggggaggaataagtttcgacacaacattgccacccacattctttactaatggccttcactggaaatcacccataataactaaaaaaacacaaaatatgcaagtgtcagggtttatgcatcagaaaaaagggggaataaagaaaattaccatccaatgcggcgacagggtcatcagctgaagaaagtgacaaaatggcacgagcgtctagggaagacgacaataactccataatcgccctgtctgacctctctaccagggtcaaaagatcctcatcaaatgatcgaaacctggtagggtcagattgccaataaaaggggaaacaagcatccccattttgattgtgcatcaaaggcagaccatctgccacctcaccacttcatgaattttgaataaacgatctttaaaacaacgaaagccattggtgtctacctcaaatagtttcttggaaatactatgtaaggagatctagccaacttttccagacaacttaatctggaaataaaacaagaaaacttgaacactcgggagaatgttcacgtgagaacacaaaacctcaaaagctaacaccaccgcccaactatttgggtggagttgagagggagcaacgttcaggaagtccagtaaagcacattgaaaagaggaaaatggaagcaatagccccagaacctcaaaaagacagcagtacataaaaaagaacggtggagctctcggtgccgtcatcataaagggaaattcgtctttcccacaagcctcgacaatcagcttgcaggagtcctcaggagttgtcagacgaatttgctgacacatgacattgatgctggtacagtagtaagggaagacttatatttcaaaacatcttccctcacccactcgaaaccaaccaccaccggagcaggaattggcgatcctgcactacggctacgacgcccatgaggagaagccttaacactcctcacatcggcaggctctaccctttcagaagcagaagcatggggagaatggtaagcaacagaggctcgttaaccttaggggtagcaaaagtcctcactttccaaacgggacaggaagtcccttctctagcttgacgggaacgagtcctcctcctagaagataaggacctttcagaaacgtctccatgagtatcctcctcagaggagtcaccaatggagattacatcgcgcataacgcgctgctcaacagagcctccagaattgctacacccatacccaaagtagaatggaaaatgggtgacttagacattttttagaaaaagactcgaaaagaagaatgaagaagaagattcaagaatgtaaggactcaggtggagtggaaatggtgaaattccctctacttaaagggggaaggaagctcaacggttatgggcggggttttgaaacatcccttagaagcccgcatcatgattgacaccactaacccactaagacacgatttccaaaaatgtggccactccttaagtgacacgtgtgcataggtaaggggcatgggtggtacactactaccagcattaatgaaggcacaaaccccgtttccaaaaatcacatcaaacggttagaaattcatcatcgtcgacgcctcacttacctgccaagctcagacttatcccgaaaagtcaaatagcctacattgggaagtccaacattcacaacttggacaacttggacaactttgtccagatttaggctcataaatccaaaataaaaaattaaagttttggtcgacctatgaagttgtcaaccttgacacactctgtctacactcgagggttgacaatactcattatactactatgacatcagacactatgcatcaatgctctttcaccctctttcgtccataaattggctcagaggctgggggcttatgtatagtccaaaatagtaaaatgacacgtgatcatctcataagggtcaccgtacacgtggacaccctccacgtcagcactgctacattaaatagttgcttattcagcctccaagtgtcaacccggacatacgtgtccgggttccatgccaacatcgctacaggagcgcagacgtcaaccttctacaggagcacggacaccaacaatattatcttctcgctaacagcatatcaaataggtcaggatattcaaataggtgcaaccaccttatcatataatatcccaacaagttatttactaattgttacttatctacaagtaacaatgtatcaataaggtacacattatctcctatttgaaattagataactacttgctattatctgttattatcttatcaacaaattatcaataagcaacggctcaaggcacatactccacgctataaatacaaccttacaggttctctctaaacacactagacactacacactgaatacactaatctcatattcactccagttaatacttgaatgcattactcaagctactcattctctatatcttatattgggttctcacactcgattattctttaacaattgatgtacttacttgagtatcgaagtgtttttcctttgttttgcaagtccctcctctaagaaaagcctactcacttctcgacgctacaggatttggagtctactatggccacttctagcccacacgtggaatttccagattttggtaagaacaatacctatggcgtataaaaaattgcttacaattaacatttcacttgtagaattaatttgaaaaagttaaaatgtgtgtttggaaacatgttattaatccaaaaaattgtgaaatctatgaaaaaaatactgaaacaagtagtagctttttgtagagacatgacttatatgaaagaaaattaattcctaaatccttatggtgaaaatcatcatccaataaaaccccataaacatcatattgaagcatcaagaaatcttaaacaaataatgtgtatttgtttccatggtggtagtgatttatctataatcttttagcccttagtttttccttacgaactttagtcttcctctgtcaaatcaattcttagagagtattctctttagatgtgaaagaaagaaaaaaaacttgatttatttgagtatatttaattgaccactttaatttaccaaatatacattaaatagtataatataattatattaatacaatatgtagtacaaagtaacgtcaacaaatttaatttcctaacattataatgtcaaacaagtttctcatgtaatttcaaaacatgctataaattggactagtttttaaaatttctttaagaaaccaatctactctcatcttgagttgatgtcacttcctctattattcttttgtttcaatttagtttttaatcaattatggtattttttatcaactgtgaaattttttaacaagagaatcaattaaaaaaaatcctaatacaactaaagaaattagaagatcaaaccaaaataaaaataaataaaacttttattttaaatgtatatattagttagcctgtttaaagactttagttgattgactaaatataagtttaaccaagaggtaggtttatatgcttatctaaaaaaatattataaataacttttcacgtcacgctagaaaaagggaaataaaaaaaaagagaaaaacattgaattatgttttcagatatttttggctaattacaaaaaaaaaaaatacatacttaattacagataaactgaaaattttggccttttgggtaaacaatcttgcactttgccaatctctaaagaagtaaaaaaaaaagcacagtatcattttgctaggttttaatgtagataaatcactaccggctcaattaatcattattcggatctaacacaaatctatccattcataaatcatttaataaggaagtctaacttattagttattttataaaaaaatgtcttccacattttagtaaaaaaattgtaaaataaatttaatatttatacaaattttatctcaacactaaaatccaagacccaaatcataaaaagacctatgcctaaaaagtcaaaaatggattttaaacttctatgaacttacacattgcattggatgattcattacccaataagaaatgatgatacattacttaatctattagtttaattattagattgatttgtagaatccatctcccaacacacaccacattgaccaaccgattttctgccaatcataagtcagggcgccacctaaccttaagtagctcatttgtattccacccaaaaacaaaactactcatttaaaattaatttaaataagtcacttagccaactcacgggtagaaatgtgcaaaaaatgtcttcaaaaaaagaaatcgaatcgaattatatgatttgaatcgaacaaaactgttttgtaaaatagttcggtttaattttttccaaaacaattttattctttttggatcagttcatttcgatccagttcagtcaaccgttttactaacaaatattgttcagtctttttagagaaccaaaccaagctgtttatgaaaatggtttggttcaattttttataacaattcaacttaagccaatgtgtttttaacacccctacctcactgataaatttgcactactagtaatcaattatggatatagtgcaagtaaacatcatgtgaaccagaaaacaactaaacatctcatgcatcatgaatgacaactataaattttgttatgcattcaggtcacagaccctatgatcaacataacaatttcaatggacaaatccatcgtataaaagcacaagagtaacgggaaaaatcatcatataactatagggaaaaggaagaagaaacacactatcagttactaacatgaagaccgcagaagggtgcgtggatggtaaattgggagttgggtatttgagaaatattggggccttagtgtcggtgatgccctactcctggacggtatgcattcctaccaattgaatttatcctaagtaccctctcctgtgagtgagaagaaccaacttcatctctatctgtagatatcgttcccacgacatgactatacttcgaagaagagagtgtccaacctccacgcttggcctgctcagcttctccattactaccgctatcttttgaaacaccaaagagcacattaaaaaatgacaaaaaaaatagactattgttggctttgctgctttgaagaaagaaatactcactcttcagccatatagtacaagcacatatatgaaagccatttatcttaatacaccctagaagtgggcatacacttttgcgtgttcaagttaaaaattatttcatagatgtggggaagaatgtggaagttgaaagaaaaatgaaaatgagattggaggaaaaaggactggaaaaagaaaacacaaacagtggtgctatgaaacttctcatgaataagatgaccatgtagtttctaaaaacaaaatgggtgcaaatacctaaaacactcttgtaatgtttaaacttaaaaccaaaaggtttaagggcatttttaaaagttaggaatatttcactgttacaaccaaattgcgcaccatgggctgccatggctgtgacactaaacaatgatgttacagtgagcaaaaagcagccaccagccaatccaccactatatcgcacttattgataacctagttctgtaaaaaattttattatttccttgaattttaattattaaagtaaattaacacttataaccaacgaatatattgcaaaatttagaaaatatgtatataaaccaatatcatttgtaaacttttcgtacaaatatgtaaacataaaattgtcaatattctataataaatttaagagatatcttctagtgaatgagattaatcatccacatccccaagtagcagaaaggataatcactcaccaacgctcccagtccatcaggcaaatgcttttgacccttttccttccattgttcttcaaagccaacaagctcatctacaaaatcacaacccaaaaccttcaggaatgcagacatacaaggatatggaattgtgaaagtagatgccatatccatagttatcatttatcaaccactacagtgggatagcaaatagcaggatgaccacgaattccacaactaagaaactactacatataaactaaataggtgtttttgtctctgatgcaatggcagtcgtgatggtcgcaataacaacatgggttcacgccattccaggcacgacaacaagctgtaatgcagcaggcatccatagagcagtcgcgaccttcggcaacagtgctatagtgacgccattgactactatggttatatcacaccataagaatcatgaatatcagattcatgacatacctgttggagtacaagtgtgagttaaagtcccacatcagataaaaatagaaaagttgagcaccatataagtaaggaatggtgtctagttcacttatatgattactcatgatctattggtgtaaaatctctccgatatttatccctctcgatttttcaacaagttaattgttgccggtatgaatttcacttgatgattgatgtttggaatctccctcattggactggagggggagatttgttgggattgaatcccaagtcaagtccagcccaataaggaaatgttagggttccttcttctaataggtcagtagttatttcttttaagttgttggcagttaatttgaaaacacaagagagagaaaaaaagagaggagaaagaaagcatcaaaattcgcatgttgagaaggacagaaattgtcatccttcaatattctagatctctttgtttaaccgttagatcttgatgagatgttttaagcaggtttgtgactcaccaatattcacatctaacggttggtttcttgaatataggctggtatcatcaccaataattcccaaaccgaactggttttgaaaccattttctgaagcatgcaacgttattgcgagggacatttctctcacactaaccgttggatcgtgtgcaaactttcagtgacggctaaaaaaatcagtttctacattttgactgttcggatcgttcatttaactgttttcaagagggattgctgcaactgcaaatagaggttatcaaaattcttgctctgttctgtcttgtttcgagcagtgatattgaaaaagggttatctctttgctcaaatgttggattgtcctcaaatttgatcagtgtatttctatcttgcaataagtcaattttaccgttgggatttgttagttactatttctggtggtagaaattaatttcgtacaaaagtccattttgtatgtttgcctcttgtgacggtttggtacaacttttgttgaagttatctgttgattgtaatggttattggaaccattttgtaatctcactttattgatagtgaataattcgggtgaactctgagatcgatcccgtgttttttatttctcacattgagaaggttttccacgttaaaaattgtgttgtgttgcttgcataattattgtttgtgtataaagtattttacttgtgcaagatcattcataataggtcttggaaggagaaattggtatctttttcccaacaactagtatcaagagctttagttattttgcctattgatttgtgattaattatggaggttaatacaagtagaatggttacactaaatggttcaaattatcatgtatggaaaggaaagatggaagatcttctttatgtgaaggagtatcacttagcagtctttggtactgagaaaccaacaaataaaactgatgaagaatgtacattgattcatcgacaggtttgtggttatatcaaccagtgggtagatgataatgttttgaatcatattagtgatgagactaatgcacaaacgttgtggaacaagcttgaacaactgtttgcaagaaagactggaaataacaaactcttcttgattaagtagatgttgatgttaaggtatcaagaaggtaccttcatgactgatcacttgaataaatttcaaggaattattcttcaactagcaggaatgagaatcaagtttgaagatgaagtacaagggctatgtgatgagtcactatttatcactaattactcatctttttgtactcattttaatccctaacttgtgcttaattgtttatattttgcattgtttctcatttaagatttaattagaccaataattcggattttaattaatttggattattttaagtttaattattctaatttttatttacagggcagtttaataattaattgagcttggagttaatttatggacttgaagattagtgcgccacgtcagcatcagcttaatatttcccatatcaaattatagatttcatttttatttatgctgaatattttccatatcagattatggattttgtttttattttattttatcttatcttatctttagtgattttgggctaaaactgttaggaaaagtccattcttttaggttagacagttactatatatttaggggttctgtgcccatggaaacacacccctctagactcactacattctacacaattttagttcagttttcctttagttttaatattttcgttttctgcttctttatttttagagtttatgtttcctattttttccagaatacaattacgtttttaattcagttttattttcgtttctgttccttctaatttctaatttcgttttctgcaatttcttgttcttctatttcgctttctgcttcttctatttcgttttcagtttctgttcttaagattgtttaatgtttcgtttcaattcaatttacgtttctgttgttaatttcgaattaatggaaggctaaacctagggttggaccctaggacagattgcaaacctttaatggaggttcttgttcttctaattcgttttctgcttgttcttccttggttgggtttttgttctgtatttttcgaattagagtcatgcttaatgattttgatattgattgattcagtaatctcagtttgcttaattatgagaaacttgccctaacgaggttcacgtttgcttaatttgtgtaatgatgttttagattaatcttcgcttagtcgattaatctggactgatgagaattaagtagaacaaattatctttcgtgaaccaaggaaattagaggcgcaatctgtcctaagggtctgacttgtttttaatcattgcaattaattattatttctgtttaattttatatattctgccaaattccttcaaaaaccccccaacacgttttcaatcccttaaacattgacaattgatccttgagagacgacctaggagtcactttcctagtactacacttaattcataataatttgacggagtacggcctccgatcaaattttggcgccgttgccggggaccattagttctgtttaagggttctgtttttgtgtgcgtgtgtttttgtttttgttttgtgttctgttatttaaaaaaaaaagaaaaaaatttcgacttgtgcctgtctcctatatcagttcttattttaattgtggtttgttatagttgtgcttcaaaaaaaaaaatttcgtttcttgcatattggttgtgttgatcaattctgcaggagcaactagggtattgaggaagaagcgcagtcgcaaggaagcaagccgcgcatactaggaagcgcagtcgcaaggagtagcgtgaataataccaatttttctgaattaattgcgattttttgttttaatagctagacttgttatttttttcgtgaatttttgtgtggtaacttcttttagcttatatttgttaggaaaaataccaaaaacatttaaagtactacagattctgagatacaaaaatttgggattcaattttttggcaaaacttaaaacggtcgtaactttcaatccgaccgtcagaatttgaagtattatacatgtttttggggtagaaaaaaaatatctacccaccccaggtggtatttccacctggcgaccgtcggatcttccaaaaaaggccgttttctattttatttttatttttgaagttttattttcctatttttccatatttgcttaatttgttttaattagttatactttgaattaggtctttcaattttgtatgctgtctattcatgattttagggtatttctctcaaaattatagctcatttggacttcgtttgagtataggtctagttttacctctctttatgcttatctgccaattgcttgatatgctgcatatagatagtgcatatagtgcatgactagaggcaatccaggagaccttcaaccctttgatcctgagatagataggacctaccatagattagttaggcattctaggaacttttcattagagtctgtagcattagataatattaacttgaattctgagtattctgttcctgagcatcctgtgcatatcatctctaattctgattttgctaattatttttatactgagaataatatggctcaacctccacctcgtgagaggactcttaaggagctggctgcacctgaatttacttatgaaagcttgtgcattcagtatcctgatgaggatgttccatatgttctcaaaactggactaatacatttgctgcccaagtttcatggtcttgtaggagagtgtccacataagcatctgaaggaattccatatagtttgttcaacaatgaaacctccagatgtccatgaagaccacattttcctaaaggcatttccacattcattggagggagtggccaaggattggctgtactaccttgctcctagatccattactggttgggatgatcttaaaagaatggttttagagaaatttttccctgcatctaggaccacaaccataagaaaagatatttctggaatcaggcagcttagtggagaaagtttatacgagtactgggagagatttaaaaagttgtgtgcaagttgtccacaccatcagatttctgaacaactccttctccaatatttttatgaaggacttaacaacatggagaggagtatgattgatgctgccagtggtggagcacttggtgatatgacccctgcagaagccagacacttgatagaaaagatggcttctaactcccagcagttcagtacaaggaatgatgctattgctatccgtggagttcatgatatagctgcacattctagttcttcttcatctgcagctacgaaattagagggcaaattagatgctttggtgaatttagtgactcaacttgctgttaaccaaaagtctgcccctgttgctagagtttgtggtgtttgcacttccaatgatcattatactgatgcatgtccctctctgcagcaacctgttggccctgatgctccacaagcttattctgcaaatatttataataataggcctcaacaacagcagcagaattatgatctgtccagtaacagatataatccagggtggagaaatcatccaaatctcagatggtcaaacaaccagcagcagcaacagcctccagtaccaccatttcaaggttctgctaccccaactagaccatatgtgcctccaccagtccaacagcagtaccagaggcaacaacaagatgttcctgttccaccagcccctcaaccttctacttctgaaccttcattggaggagctagtgagacagataactttgcaaaatttacaattccagcaagagactagagcttccatccagagtctgaccaatcagatggggcagatggccactcaacttaatcaggcacagtcacagaattcagatagacttccctctcagactgtgcagaatccgaaaaatgtgagtgccatcacattgaggtcgggaaaacagattgacatacctaccacaataaccgcacctccatccataccagttcctatacctgcacctgtaccaacacatgagcaaaaggatgaccaaattcgtgcagatgaaccttcttctagcattagttttgatgtgcagcagcagcagacttctatccctcttccattccctcctagatcaattccaagcaaaaagatggaagaggtggataaggagatactggaaatcttcaagaaagtagaggtcaacatacctctgcttgatgccattaagcatatcccgaaatatgctaaattcctgaaggagctgtgcactaataagaggaagaggaagatgactggaattgagagagtcagcatgggcagaaatgtttcttctatgacaggtaatactgttccaaatatgcctgaaaaatgtgaggacccaggtacttttagcataccctgtattattggtagtaataaatttgataaagctatgcttgatttaggtgcctccataaatgttatgcctctgtccatttttaaatctatgtcccttggtcccttgcaccctacgggtgtagtgatacagttagcaaataggagtgttgcataccctacaggtttcattgaggatgtcttagttagggttggtgaattgatttttcctgctgatttttatgtgcttgatatggaggagggattctcccatggttctgtccccctcattctaggtaggccatttatgaaaacagcccgaattaagattgatgtgtatgctggtacattgactatggaatttggtgatattgttgttcattttaacattattgatgccatgaaacatccatctgaaaatcattctgtctttcgtgctgagattcttgatgatgttgttgatgagtatgtttctgatttctattcttcctatgctacaaaacaatgttttctatctgatctttatacttctcatgcatgcatgaaatctgaatatgaatctgacaatgaatccaactttgattttcaatctgaacatatgtctcattttgatgtaagttctgagattaattctgatgtattggatattgtacctctgcatataaattctttagagtcagaatgcactaaccatttttcagggagtgcacaagaatctgacttgcaggttgaggtacaggctgtggaacccattcttcttccatctctggttccttcttctgatcagcccacccccattccggaattaaaacctttaccggaaaacctcaagtatgcctacttggataatgatgagaagttaccagtgatcatttccacttcccttgatgctgatcaagaggacaagctgttgcaagttctgaaaaagcgtaagaaagccatcggatggaccctggcagatatatccggtattagcccatccacttgcatgcatagaatatcattggaggatggagctaaacctgtgagacagccacaaaggagactcaacctagtgattctggatgtagtgaagaaggaggtgaccaagcttcttcaggctgggatcatttatcctatttctgacagtcaatgggtgagtccagtccaggtagtcccaaagaagacaggcttcactgttgtaaaaaatgacaaggatgagcttatcccaaccagagtgcaaaacagttggagggtctgcattgattaccgaaggctgaaccaagcaacatggaaagatcattttccgctgccattcattgaccagatgcttgagcgtctggtaggtaaatctcactactgttttcttgatggtttttctggttattttcaaatccatattgctcctgaggatcaggagaagaccacattcacctgcccctttggcacttttgcttataggaggatgccctttggcctatgtaacgcacctgcaacattccagcggtgcatgcttagtatattttctgattttcttgaaaactgcatagaggtgtttatggacgattttacagtgtatggatcttcttttgacatgtgtttagatagtctggataaagtgcttaatagatgcattgaaactaaccttgttttgaattttgagaaatgtcatttcatggtagaacagggaatagttttagggcatattatttctagtaaaggcatagaggtagatcctgcaaaaatatctgttatttcacatctgccttacccctcttgcgagcgagaggttcgttctttccttggtcatgcaggtttctacaggcgttttatcagagatttcagtaagaaagcccttccgctatctaatctgctgcaaaaagatgtagaatttaattttgatgatagttgtaagaaggcgtttgatcatttaaaggaagcattgaccactactcctatcctccaggcaccagactggacagttccatttgaattgatgtgtgatgcatccaactatgcattgggagctgtcctggcacagaaagttgataaactgcctagagtgatctattatgcttccaggactttggatgctgcccaagcaaactacaccacaactgagaaagagcttcttgccattgtgtttgctcttgataaatttagatcatatttgcttggttctcctgttattgtttatactgaccatgcagctctaaagtatctgttaaagaagactgactccaagcctagactgatcagatggatgctcttgctccaagaatttgatttggatatccgtgataggagtggagctcagaatttggtagcagttgtggaggagatatctctgcttgaccctgactcccttccatcttccactacaccttagggagttttctttatctttctcctcctttatttttatcgcatttgtccatatttattgcattattctgattgttctgaacttttatttgtgccacattgaggacaatgtgtaattttaagtgtgggggggagagactgttattttttgttttgttttgtttgttagttttgttttgttttgttctattagttttattgtcttgttttgttagttttaagtcttatttttgcgaatagttttgcatgtttctttttgatttctgggttttgaataaagtgttgacacctactttatgcttagataagagttgcttcatactgtatgatttgaaatccatgtttttctttacttggaaagatgattatgaagtttgaaaggttgatttaactgtgacagatataccctgtgtgaggatttgagccactatctgttctttcatgtgtgctatacctcttgattgcttgcacagttgccttgtcttgactctgtttgatatttcttggttctcatgcatgtttggatatgattaaggcatttttgttctgataagcctctggccaaataagcttaccctgaatttaattcctttgacaaccctgttgagcctaatttcctttcttttgtttaaagctcattacaagccttaagtgaaaaacaattatttaccttaaccttagggaattttggagctttggaattgttttgggaataagtaaggggggtgcatgtatatattattttggatgatatctctggcctgttggtttactatgatgatcagcttattcttcatgtttctatgcatatatcaatcaaaaaaaaaagaaaaaaaatagaaatgaaagaaaagaacaaaaatataataaattgaagaattgttgtgtttgaagcaaaggaaaaggaatggtgttagaggctgattagagatttatgggtttgtttttgtgcttacttcttacttattccccattgctcctctagttcctctggtttgcagctacttatcccatattttatcctacccatgtccttgaccacattacaaccctgaaaagaccttttgatccttatatgcatgtttattgggtgttgattatagaggcttgccaagtctatctgttgcttgttttcatgagtgttctgagagtatacagttgactaaacacttgagagatacagtgtgtgatacagtgcatctagtgaggttctgttgcttttaattcacctcttgagcagattgattgttttgataagttttgaatgcttggacgagtttcataagtgtgtagtttctctgactctttgtgtgttggaaattgtcaattactttctcttttcccagttttcattgaggattgtgcagaactgtttattttacgatgtgtcactttctttaatgtctttagaatttttccttgctctactctactttttgattttgcccaggagtgcaaaaggctaagtatggggggttttgatgagtcactatttatcactaattactcatctttttgtactcattttaatccctaacttgtgcttaattgtttatattttgcattgtttctcatttaagatttaattagaccaataattcggattttaattaatttggattattttaagtttaattattctaatttttatttacagggcagtttaataattaattgagcttggagttaatttatggacttgaagattagtgcgccacgtcagcatcagcttaatatttcccatatcaaattatagatttcatttttatttatgctgaatattttccatatcagattatggattttgtttttattttattttatcttatcttatctttagtgattttgggctaaaactgttaggaaaagtccattcttttaggttagacagttactatatatttaggggttctgtgcccatggaaacacacccctctagactcactacattctacacaattttagttcagttttcctttagttttaatattttcgttttctgcttctttatttttagagtttatgtttcctattttttccagaatacaattacgtttttaattcagttttattttcgtttctgttccttctaatttctaattttttttttctgcaatttcttgttcttctatttcgctttctgcttcttctatttcgttttcagtttctgttcttaagattgtttaatgtttcgtttcaattcaatttacatttctgttgttaatttcgaattaatggaaggctaaacctagggttggaccctaggacagattgcaaacctttaatggaggttcttgttcttctaattcgttttctgcttgttcttccttggttgggtttttgttctgtatttttcgaattagagtcatgcttaatgattttgatattgattgattcagtaatctcagtttgcttaattatgagaaacttgccctaacgaggttcacgtttgcttaattcgtgtaatgacgttttagattaatcttcgcttagtcgattaatctggactgatgagaattaagtagaacaaattatctttcgtgaaccaaggaaattagaggcgcaatctgtcctaagggtctgacttgtttttaatcattgcaattaattattatttctgtttaattttatatattctgccaaattccttcaaaaaccccccaacacgttttcaatcccttaaacattgacaattgatccttgagagacgacctaggagtcactttcctagtactacacttaattcataataatttgacggagtacgacctccgatcactatggttgcttggtactttgtcggactcgtgggagatgtttagaatgtctctatctaattcagcccctgatggtataatcagcatgaattttgcgaagagtagtatcttaaatgaagaaatgagaagaaaggcacaaacttcgtcttctcaattagaagtcttagttactgaaagaagggggaaaagtaaaagccgaagtccgaataatagagataaaggaagaagaaagtctaacaagtttgccaatgttgagtgtcactattgtggtttgaaaggacatataaagaagtattgtaaaaaattaaagaaagataataaacaaggaaagttgaaggataataagaatgacgaaggtggtaaagatgatcgagttgctactactacttcagatttcctccttgtttatgatggtgaagcaattaatcttttatgtcatgagaccaactgggtgatagatagtggagcaagcattcatgctacatcttgcagggatttctttacatcttataaatccggtgattttggatttgtcaagatgggtaatgatggcttggccaatgtgattggagttggagatgtgtgcttggagactagcaatggcacaaggttagtcttacatgatgttaaacatattcctgatattcgtttgaacttgatttcaacaggaaaacttgatgatgggggattttgtaacacattcaatgatggtcaatggaagttcactaaaggttcaatgattgtggctagaggcaagaagtgttcatcattgtatattacacatgcaaggatctctacagggaaaattaatgctgtagaagatgaagatacaatggagttgtggcacaagagacttagtcacattagtgagaaaggcttgactcttttagcgaacaaggagcaacttccaggattgaagaaaacaccattgaagaagtgttctcattgcttagcaggaaagcaaaatagagttgcattcaagagtttcccttcttcaggaatgtcaactatgtaacaccccaaaaattgggaatcacagtcaattgttaggattaaaggcagtacaaaagatttgggagaaatgatgaaaatacccttaaacattttgaaaaaagacacatatgtcccttttgaaaatgacataaatatccttggacaatttcaaaaatgacagataggtccctgaagcactaaatgaccaaaatacccttggatattttattaatgaccaaattgtcctaggaagtctggtaagatatttaaggaagaaatgttataaatattctcagatgggttagaaataaccaaagatacccttagagtgacaattacagagtttccctgaacatttttagaaaatgacaattatgcccctagggtgaggagtaaaattactaaaatacccctaggtcaaaaatgacccaaatgacttcagaaaattgtggaaacctgagtattggatgaaatgcttttagaaaacaaataatcagcaaggttgagggcaaagaatcctaaaatagaatttatacgaattttggaagataagttgaaaagagcttaacctagactatctcgagtaccaaaaaattagaggaaaaggatggatataatctatgaattttttattaattatggaaggaataggttgcctaaataagttagtatagtaattttagtaattccaggcaaaatggaccaataagaatcgagattaaactattgcatgtaaaggagaaagaattggtggatttggatttctaaattaagctttgaccgtatgatacaagatcaatggaaaaactttaagaaacttcaagaatggacacatggaaagtaggaaaacactagccaatgagataaaacctagtggaaagccaagcaatgatggtttaaggagatttttgttgaagaaaattttctcttgactcctttggacacagatgaagttctaggaattatttcaaagatcccaatggtccaaagttatatatatgggataggagtatacctttaaaattttaagaagatccaacggttaacgaacccagaattattattttacagaaacggatttttccaaaaatgaagcaaaatacaaaaatctattaagccaaagctacctacggatttgaataaaatcaaatggaatacacgttgctgaagcaaatgcacgtgcaatgctagatgagaatagaatggtgtggaaaaatcatgaaataggacacttggatggtgcaaattaaatagccaataagagaaaaccaaccaaaaagctaagtaatcataagctttagagatttttgtaggaaagccaatccacttagcatataaatagggagaggggccagaaatttgagagctcaaggcgagcctagaccgtgcaaatatccatcccaaagcttgtccatttcctttcatcttaatactacttttgacttagaacacaaaacacaaagcctaactcttgaagtccacatgaagcactagccattttaggagcaagagccattcaaattcaaggaaggaaggctgtccaaagttatatattggaaaatacagtcactctggcttaattgattctaaattaaataactaagtgttggatgaataacttgaactaaatttaataaagaaaagtaggaatcaaccgaaaactagaggtagtctagttgtctttaaggaaacaatcatttaaagctataatagttaaataaaatatgttgacatatgtgatgattggctgaaaattatgctatgattcttggagtatttatgttaaatttggtgctagaaattggttggaaatatgtctatgatgtggagctttataaagaatgatgattaaatagttttcttttaagtattctatgttgcacaccatgagtttgataatttgcttcaatgagtaaaatatatttaaaagttgtttatttgaatctttatggactggagttgaattatatccatgatgaaatgatttaactaagatggtgtattattcaaagtgatgtgaagttaaaattcatgaaacttatattatgataaatgattttataaacgttgataaagtcaatatgttgtatggtggtattatgtcttgatgttgaaaaatgaattaagaattgtattatgttgatggaataattggaatccttgtgttgtatggtgattacttatggattccaagagttgtggtgaattgtagcagtatgctgagatttgtggtgtaaagttttatgtgatggtggaaataagctttatgtattgttctaaaaggcatataagatgaaaagataaaatgaatcattcatgcatttcatatgcatatgcctggcgggggttaatcagtggagttatgccttgctggggttaatccgtggagatgttgtcagatagctaaactgagtccacgcgttcaaggtgttatgaacttgggggtagttgagatagggaggaccacaccaccatgatgatcacataggtggaggtgactatcctacgcgcccctgggctaccccgactggttggataagtttatttgtgccaccagagagggtgaggctatcttgactgtggccactgatgatgattttatgatgagctgagatctcagtcatgcatcatataaaaagacgagcatgcatcttatacatcgcacaatgggtatatgtatgatgatctgtacactgtataagttgtgtggattttatctatctgtgtttatattgttcaaactatgtttggcaaaaacttacccgagttgtgtctatggttgacacctgtgatgaccccaattcatttgggcgagcagaggaacaggaaagcatgagctgtagatgaagattgttgaagaagttttgataagaagttgtatgctgtgacttgtaatttgtaataagtggtctgtatattattttggatactatatttggactgtatcatggactgtattcttattatatgaaccgtggtgaggaaaatcgtttagactacgaacaaatcattagcaagcaaggcaaaaagaattttcgcaaaaaatttacaactaagatcattttaatacaaaaaaaaaacacgaatttttaattaaaatcaatcaagcacgagagagtcacgagaggcgttacaaactacacttgatttagtatactctaatgtttgtggtcctatgaagacaaaaacacttggtggttctctttattttgtcactttcatatatgatcattcaaggaagacatgggtttacaccttgaagacaaaagatcaagtgttggatgtgtttaagcagtttcaggcctcagttgagagacagtctaggaagaagttgaagtgcataagaacagataatggtggagagtacacaggtccttttgatcattattgcagacaacaaggcatccgacatcaaaagaggcctcctaagactcctcagttgaatggtcttgctgagaggatgaataggacactggttgaaagagttagatgtgtactctcacattcacagttgcctatgtcattttggggtgaggctttgagcactattgttcatgttttaaatctcacaccatgtgttccattgcagtttgatgttccatagaaagtttggactggtaggaatgtttcctatgataatttgcgtgtctttgggtgcaaggcttttgtgcatatccccaaagatgagagatccaaacttgattttaaaacacgatagtgtgtgtttattggatatggacttgatgagtttggctacaggttctatgatccagtacagaagaaacttttgagaagttagagccgatggtttgacttggtgaccggctcggccaagtaagaaggcgtttgtgaatccatagacgtggagatccgttgtatcgaaagtcttgctggcgggtgagtccatgcatggaggccaggcagcgagtcctacaaatgttgcggctatacaaggtactagagcataagctctgagggccattacttatgaatattgaaaatgactttcgctcgagggggagactaccatgtggaagaaactcactttgagggggagattgttggagtacaagtgtgagttaaagttccatatcagataaaaatagaaaagttgagcaccatataagtaaggagtggtgtcaaattcacttatatggttactcatgatctattggtgtaaaatctctctgatatttaccctctcgattttccaacaagttaatttccctcattggactagagggcgagatttgttgggcttgaatcccaagtcaagtccagcccaataagaaaatataagggttccttcttttaataggccagaagttacttcttttaagttgttggcagttaatttgaaaacacaagagagagaaaaaaagagaggagaaagaaaacatcaaaattcgcatgttgagaaggacaaaaactatcatcctttaatcttctatatgtacttgttttaccgttagatcttggtgaaatgttttcagcaggttcgtgactcaccaatattaacatctaacggttggtttcttgaatagaggcttgtagcatcaccaagaattcccaaaccgaactggttctgaaaccgttttctgaagcatgcagcgttattgcgagggaaatttctctcacactaaccgttggatcgtgttcatactttgagtaaaggttaataaaatcagtttctacattatgaccatttcgatcgttcatctaaatgttttcaagagggattattgcaactataaatagaggttatcaaaattcatgctctgttctgtgttgttttagacagtgatattgaaaaaggtttatctctttgctcaactgttggatggtcctaaaatttgattagtgtgttcctttattgcaattagtcaatttgaccgtagggattttgtagttattatttctggtggtagaaatatatttcttacaaaagtctattttgtatgtttgcctcttgtgatggtttggtacaacttttgttgaagttgtctgttgatttattggaaccattttgtaatctcactttattgatagtgaagaatttgggtgaactctgagatcggtcccgtggtttttatttctcacattgagaaggttttccacgttaaaaattgtattgtgttgcttgcataattattgtttgtgtataaagtattttgcttgtgcaagaccattcataataggtcttggaagggaaaattggtatctttttcccaacaataccttcctttatattgagcagcatttgcctagtatccaccctaccatctgaattcagatttcttgagtgaatgtccctataacatatcatatcatatataagtaaaataaaataagagatctattagaagttaaaccattaaaaatttgacaacaaaagttattccaaaaccaaaccaactgaatctaacatagccatcaaagagaatagtatatggataccttcccatgattgcctctagaaattaggtgagaagcttgcattgttgaactatcagcctccttcctttcttcaaatgtcacctaacacaacaaagatgacatcagaaaaataatattatgcaaatcttggatttggtctaggttctaaacaacaagttgccccttttgggagagagcaaaagcacctattgctgaaaacaaaacactcgttaccttcaatttcatcattcggatgttcaacagagtgttcaccatctgacctaccttgctttctcaaattttctttcttctccttcgctgtgtcatcattttcttcatcatagtccaattcctgaatgattggtcccctctttttttttttttttttgtacgagccaactttcacttcacttgtcctctaacaggggacggaggatgaaagatggtctccgtgctctcaccttgggctactttctccaatcgcttcttttgtttttcctccatcaatctctattctaacaaatcgtaacccccacgagacaacatgtgaggggtagtgttcagcttagggatggcctgagccttatttctaacatcctgtaagaattacacatatagttgtaaaaaaaatgcacttgaaagacttcataatagtgaaattgtaaaataatgcaactcagctaacctcccatgaagctgatctacgactctcacagaattggtgccacttttccttactgatactgtatttgtcacaaacaatgtcagcatcattctccttgcgttgtgccagagcccattttgaggtcaggtctgacttaaatttcctccatcattctcgtattgtctgcaaaattttcttcttcgttcgttggtcggacgcttcaggtatattaaattcaacctgcgatacaaaaaacaagtttaatagttacaataacatttaagttgtattactaaaaacaatgacattggacatttgattgtaatacttgaatgtcctcccaaatcaactccttctgcgtggcaggaacttccttacagttagcaatggtgacatctaccttgtcttgagccacgatccctagatacatcctcaatttatttgcctgaggaccatcagccttcccaatggcaggatccacatgaaccactggtctctatcagcaccgacaggtgctaactcaagaagaggtggtgtcgtctcaggaagaggagatgctaactcaggactaggaggtgctgactcagggcgaggaggggagctcgatggtgtagtcatgatcctattaaaaacaaaaacaaatataagtaaagttaagtgaaaagtaaggttaattgtgaaattgtaaaagtcgaaacaagttaatataaaataaaaattacattaaacgatgttaattaattctccttcatcatgatcattacgatttgcatgaatgtcgtcaacttcatcttctctattgatgtccgacatttgtgtcgagaattgagtcacaccagtatcaagggttgaatcatcatcgtcaagattaatactaatggtttttccatatagtaccactaaccacctttcatcacaaggatcttgaacataaaacactcgtttagcttgttctgccatgatgaaaaaggttcattttgataagctagcttgttaagatctatcaaagtaaatcctgaatcctcggtttgcacaccactattgatatcaacccacttacacttgaaaacacacacaatgaatttaacataattaagctcccagatgtcatcaatgacttcaaagtaaggtatgcacgccaaacgtggattgtggtcatgcacagtagctaagtgctgcgattcagccctaaggctaaccccactgttttgcattgtgctcttgtcatcttgttgtttggtgtagaatgagtacttgttgatattatatccctgccaacttctaacatttcttttaggcccatctgctaacttcctcattgtttcagagtaagattcatcactaaatattgtatttttaaaccaattcaggagtcttgttatgctctttcaacaacctattctttgtcattcttggattactttccttgactaaggcttcatgacgaactatgtatggcaggaattcattattgttattcaggacatacaaatgagcttgttgcaattcatgtaaagcaggcgttataacatgcagccttcgtgaacccttacctatgactctgtcgtcatgccgagcctcgggaagcccaataggttttgccttttcaaggtactctaaacaaaattctacatcttcttctgcaatgtacctttcaactatggatgcttcaggatgctgtagattttttttataccctttcaagatcttcatgtatcgctcgatcgggtacatccaccgtaaataaacgggaccacacaatttaatttccctgaccagatgaacacgtgaaccattatgtcgaaaaatgaaggaggaaaatacatctccaactaacacaagataattgccgcctcatccttcaagtcatctaactttactgggtccacgactttgctataaatggcattgaagaaaaaacaaaggcgagttatagcatgcctcactttgttaggcaaaatgtctcgaatcgccacagctaacagttattgcatcaacacgtggcaatcatgagactttaagccaactagtttcagatttttgatttgcacaaggctcttaatatttaaagagtatccctgtggcactttcactcggtgcagacactgacaaaaacttgtcttttcctttcttgacaaagtgtgacatgctggaggcaagtatattttcttaccatcagacctaggatgtaactgctcacgtatacccatctcagcaagatcttaacaagtatttaaaccatcctttgtctttccttgaatgttaagcagcgtgtcgatgacactgtcacacacatttttctccacatgcataacatcgatacaatgtctaacatctagatcagaccagtatggaagatcaaacaatattgacctcttttttcatatacaagtattaccttttagcttcttttggatctttccaaatacagtatggatgtcctcaacccgctcaagaacctactcattggtgaacggaatcaatgcagtttcatgctcttgacttccattaaatgctgttttcaatcgtcgataagggtgataaggtttcagaaaacaacgatggcaagtgtaaaatgtttttcttccatgttttaagttgcacgtaattcgtgtcttgctcataagatacaccccatttgagttagtatagcttatggaatcacaatttcaagctttgctctttttcaataaatcttactctgttttcatgaactgcacctatgggcttggtttctatagattttgaccttggaattgagttcctcatgtttgaaaacatagggtttgatatagaatttgcatgaattggatttctataactcttggaaattagaaaataagttttgtgaacttttggaattatgtgcaaggtagtttgacattagggtcaaatggaagtggatttagggaattttgagtccaaagatgagttcctgcatttgaaaaccttgagaagcatatatgatttgtcctaaatggatttacatcaatggaaaaattcatttcaaagtgggcaattatatacaattccaaatgagaatgtgtcatgaatatgtagaaatgcatggaataaatgatatgacttatggaatgagttattgaatttgattaagactttattatgtgaaattctagaaattgttatgttgtatgttgtaagaccaagtgagtgtgatcacttggcatatcatgtttcatgttatgagtatagttttattaatgatgcagattatgaattatcatgctttgggattgggtttggggggtgtttgaccttcaacaaaatttactttgaatgttccacttaaagggtcatgttgatgttgacccaagagagggaggaggattaatttccttcctctcttgatatgtttgtgtgtctgtgcatgatggaggatatttgttgttgggagcttcatgaggattggaatgcattaagagaaaggaatagatgaaaaaagtaagcgatagtgttagaattagagggattgttgtgtcaggagttggggcatgaccttatactcattgggaaaattttctttaatatttattcacaagtaccaacgcgatcgtcgttcatgcttttcatcatgaaggatgagtggggatttgtaaagagagggtagatgacatacaataggtacattgggggacggtccaaatgattcaaaggaacctaggggatgttaagtggtgataatccgactagggacattttcggttagtttgggggactcgcatgcttcacttggcattattgactagtgaagagccgtatccatggttggtgagagtgccaagtcctgtatcggcatgtgacatgtcctcctaatcatcatccatatgttgcataagaccacgaaggcttggtaggcttagtggcagttttgggcccaagacaataacaatgtgtgagtagaagtgcagaataggataccatgggtgatgcatactagtaaaccacacatggtggttgttaggtcatgtgtgggacttaatgtccgtattgtggcttctagagggatggagtactcattcctttgttaccattttcaggattagatgtcaagctcgaccctgattacctcattcttatgatgccatcaagtcatggttgaagcatcatgttgtgctccatgttgacaacatctacaggttccttaattgtcatcgtgcgtcaatggacataccatgatacatgccccgcatagttgacttctacgtttggtggactcatcccacaccatcttactattgcttcaccaggtccatgctagaggttgtcattcctctattggatcagactcttcatctgaggacattgaggccatttcctctactctaatgtctccctaatcagtgttgtctgagtcttgggtaccacctggggcatacaatgtggatcttgtgtaagaggataagggagaggatttggaggaggacacgtctttcaagatggattcatggatggatgaggaggaccccatcatagagccgaaacttatggaggatgattcttcacaggattcttctaatatgttttgctactttgtatatgttactcactggttccactgagacgcacatgttttgccactttttatagcacattacaattatttatctatatctggtgaccatggaggttcacctacttatcattacttattatttgagcatatatggtttatttatgtttctatttttactcaccgactcaaggttttaacatgttaagcaattactatgttttgaaaattaagtgatgttttatgatataagaatagaaagttcttattttcgccaaaaaatttctctatcttttctaatcttttgagataaaattaatgagaattgaggactatctatttgttaagtaaatcaatgggttattttgaaaaatatgtttaagggcgttacaattaacaaatttttcttgtacacaatcaacgttccatgtcaaaaggtgttataatttattgatgttgcatacgaaatgagaattgagaaagaatgcatatggcaacttgtaggcttgtgcttcaacttttatacattataataaatacttatacaaaaacttctagagtcatctaagtccctgttaagacactcaagtggaagatttgaacaaaagaagaccttatcacaattttattttgaaaggaaaacaaaatttattaaataatttgtaatttttttttatatgaagagttcccaaaacaaggacataatgtaagcttaattctagtcttagcttttgcactatcaatagctcttaagcttaactaaaaaccaaatgtgtctatctagtgaaggaggtataatatcatgatagatccaggattgtgcttcaacatttatacattcatttatcccatgattttaaatgagtcatgaaaccatttttgttttgataaataaaaggacatagttcacactgcaataaacttttgtagttacatctaaagtttcatgcatgttgacaattgttctaaactattgatgtggcatgaaatatgaattgaaaacaatcaacataatggttttttgtcttatacttcaacttttatttatttatcccattaacgattttaaatgactcatgaaaccatttttgttttgataaataaaaggacatagttcacactgcaataaacttttgtatataattcaaagttgcatgcatgttcacatatgttctaaaatattgatgtggcatgaaatgtgaattgaaaagcaatccacattacaatttctaggcttgtgcttaaacttttatgtatttatttatcccattaatgattctaaatttaaccatttttgttttttttgaataaaatgtcatagttcacattgcaataaacttttatatacaaccaaagttaaatgcatgttgacaggtgttgtaaactgttgatgtgacattaaatgtgaattgaaaaacaatccacatggtagttttaaggcttgtgctgaaacttttatatatttatatgtgccattaataattttaatggaccttgttttgtttaataaaagaaaagagttcaaactgcaataaacttttgtatacaaccaaagttgcatgcatgttggcagttgttctaaactcttgatgtggcatgaaatgagaattaaaatcaatgcacatgctagtttctaggcttgtgctgaaacttttatatatttacatatgccattaataattttaaatggaacctatttttttaataaaagaaaagattttaggctgtaataaacttttgtatacaaccaaagttgcatgcatgttgacaggtgttctaaactgttgatgtgacatgaaatgtaaattgaaaaacaatctacatgacagtttctaggcttgtgcttaaacttttatacatttatttatcctattaatgattttaaatggaaccacttttgttttgctgaataaaagaagagttcatattgcaatacacttttgtatacaaccaaaattgcatgcatgttgacaagtgttttaaattgttgatgtgacattaaatatgaattgaaaaagaattcacatgtcagtttctaggcttgtgcttaaacttttatatatttatttatctctttaataattttaaatggaattgtttttgttttgttgaataaaagaaaagacttcatactgcaatacacttttatatacaaccaaaattgcatgcatgttgacaagtgttctaaactgttgatgtggaaacttttaggcttgtgcttcatcttttataaattataaatagatagactatggggttcaatttttaaatcaacttagagagtgctttctcaaatctcctttgaaatgttatctaaagtattggtgggaaaggtaagaacaacctcacttgtatcttttttttcttctgtagtttatggatacatgacaccatggaatttaaattaggaagtctaatttgaatatttgtgttagttggtgttagatgcatgatgttgagcatatgaattttgatacttactggatttgaccttttgaaatttctttaatttctgtttaattgattatgttgatgcatcatccactacatgtttctattatttaaatttgttttcctgatccactattgatgcatgatgtttctattgacaagcacaaggattcaataggttaagagaatgttaaagtttgaaacttcttctttggtgtcttctattaaagagctagcaaaggaacctatcaccaaagttccaaagaaatatctttgtccaaacatagacccttcagctatatctaacacaacttcttcacaacaagtctcaattgtcgacctcaataaattattatctgaagatgtaattgagctagagaagctagaccgtgcatgtaaggaataaggcttcttccaggtttgaattaatattactttaatttactattttttgcactagttaaaacttctaccaacattacatccaagagttcacatgattaacatgaaacacaataatgcatttttttagtaataaaactataattgatgagtaagactgaaaataataggaatactttaatacaaccaagaggggggttgaattggttgtaccttggtaaattaaaattttcaaatcagagtttccacaggatctttatcactttaaaaaatagttttgaaaccaagaatcttgtattcaatcaaattcctctgtcaagaaatcaataagcaaatgagagttttctgtgtaatgtaatttgattcacaaccaaagaaattgagagatgaagagataagaataaagatcagccacaaatttgatgctggttcacttcaaacactgtgaagttacatccagttcttctactcaacactagagtagagttccacaattgcaaataatattcttacaagatattacaagcctctctttatcaaccctagatgaatttcagatgtctaaaacactattagacccttagagaccaaacccaaaactgagaacactactcagcaacccttagagaaacactatctctaatcatcatgtaagaaacccatttacaataagccaatctttacagaaatcaattaaaagatttacaccttcaaagaataaggaaagatttcacctaataatccaaagaacacatgcaagtgaatgattcaacaggttgaaagaaagattgcagactcaatgcattcctttccttaagctttgagactcaatgatgcttcacttcttcaaatcaaaaaacccatacgaatttgtgaagcctaaatgctttttgaaactcagaaatacactaaagaaagctcatgaatgtttgtgattgcccagaatacgaattattcaatcttataaagcacagggcaatgggttcaatttataacagctttctaactgaaaataatcgattaaacacgctcctataatcgattatttcgcatttgtaatcgattattccaagaatgtaatcgattaaagtgctcctgatatattctgggtttgagctatgaacaatgtaatcgattattccataaagtaatcgattaaaccagacactcatgtttttccaaatgcactgagtaatcgattacgaaatttggtaatcgattaagacagacagaccaatattttcaaatgtactatgtaatcgattaaaacaatatgtaatcgattaaatcagtagaagatgttacccacaggcattagatgtaatcaattacgaatttctgtaatcgattaagacagtcaatatgatttttccattttagcctatgtaatcgattaattcgatatgtaatcgattacaatgttcttgatttgttttccaaaaggcacgaagaacaaaataatcgatgccaacaatgctgtaatcgattaatgcatgaaaacttcatttttccaaaaactttgattttaaaatgccttactagttaattgcttttatttagaccttcaatctaacaatcctagatgaatgattatgcataatgtgctagttggattatcagataacacatcttcccttttacatgaatcaaattgatcttcatagcttctttggcacttttccaatgaggcatgttgaaagcacaaaacaccaaagcttgatccttgttcattcatgcatgactcttcttgaatcaacaatctccccctttttggctttaaacatgccaaatcttcaatttgattaagctcagatacttggagattaattgaggttttcaatgatgaacttcaagcttaataacctgtaaaaatttcaaatgccttttgccaagaaacaagtgttaaagcatatgtgattcatgaaacttcaattaagctttatactaatttattgagttcctttttacacctttactccctctaaattccagcacacattaacatcaaaattttgggcaaaaaaatgaaccaaaaacaggggcaaacagagggtattcagagggtatttgaattcactccccctatttggcttgttaaaagtcaaaaacaatgtaagcacagcggatattgaactggaaatgcatatttcattaaaatgagtgtcatagagggcagtgcatagtaaaaagaaacatatttaaaaaacactgaaaaataacaaatataaaactaaaataagcaaatatacaagcaatctaagcaatcctagaattcaacagaggcattgtcattcatgttggcctcaattgaatccagtctttctctaatttcttctaaggcttcatgtgtttcagccttgaagtcctcttggagcttgagcatgctatccatcttttgaatcatcaatgattcaaaatcagtaaaggctggctgtgcaggctgttgttgttcctcatctcctgaatcaacaaccatttcttccccttgtttagcagctctaatttgattggccatcacccagccattgggtgtcttcctcatacccatcttggtcaaatgtttctctttaatttgactattggatgagtttgtgttatctaccacctcattctcaacatcaatgttgaaatgatcaatcagccttgagacaaacgctagatatgggaaagggtagttcactaaccttttggattttaacatgatttcctcaaagattagtacccagttcatgggaatatgatttttcagcccatataccaactaaagatcctcatcagttgcttgggcatggttagttgcccttggtgtaattacgtaggtgatgatgtagtgtagaagcctgtcctcagcagttataggacctgtacccagcctatttcttagcctcatgtgaggatcatgaagcatttctctgtaggtgtccattttgctatagccctcaggatcctcatcaaacctcttagcactttcacacactaccccagccactatttcttaaatttctggtgttacaatcatctcaacacccttaaccttggattttatagccccttgcattgaccctttcaagcaagtataaaataccttaactagatcagggtagaaagtacccttcatctctaaaaaccttctcagtccttggacttcaaggaaggctggaaactgaaaaccctccctaatgaaccagtcaagttcaagatacttgggagaggccacaggcttggtggcattgaattggaggtagttgattttatcttactctgtggagaatgtaaggacttttattttcggcgcttaaccccgcgcgatagcgcggggattcaggtcagaaaaccctgctaagggtgcggcgccggtggcgccaggattggcgctgatggcgccaaatgtaatagcttgaattcgtaagcatatgtttaagcttagtttaagcatgaatctaagtttaagggttaaggaatatgatcatgctttagaatcctctgaaagatgcttaaaaatgcaagtttgtggattgttctggcatatggcgcgacccacgccatataggtaatatggggcagatggctctgccatgtcacgcgagtcacttgaagatccacgcgagtcgcgtggcaagtggtccagaaatcatggttttttttctggggctccacgcgagtcacttgggatccacgcgggtcgcgtggaaggcccgaatgaatggcgcgagtcgcgtgggaaaacgacgcgagtcgcgtgggaagtggcttagaaatggtatttctgtctgccatcccaagtgagtcgcgtgggagtccaagtgagtcgcgtgggaacgtcggcagattagaatttaaaggccaaaacgttagaaatggaaggaaaaaccatttcttcttcctccctttagccaacctccattgttgaagtcctaaagcttcttaggacttgatttctcagcctaaacacttccctgagccttagaatcttgattgaaccgattagaaagcttgaatccttcatctaattccttgaaaaccccaatttgagtgagaagaggaacctcagagggaaaagctcagagaactcgagcttggcacagaaccacagcgtaattggaacatagaagctaggagaagctgttctgaggctgttgggttcgccactgaggtaagaaacttaagtttcaccgtttaattttgattctgggggtccctgtgaatagtgacccatatgagctggggctagaattagctcagggtccagttgagaaagttgttcagggcttagaatagatgaaggattagctttcagtttttgattctgataactttgaatcttggctctgtatatgcctgtgtgacttatgtagagtcacttgttgatggttctctgataggccagagccttgattgtgatgctctgagctgaaaggctggtagagcagggctttgaatgaacctcagcccctttctgataacaattaaattgtgaggctgggtaaggcttagttatgtatatgtgcagcgagtctagaatgactcagatggattgtattccatcctgatggaccttgagtggtcttagagcagcctagtgtaggctgagttggcttgaaccctaggataggggatttctgtatgatgtatatatatatattgtgaatttcatgtctgtggtctggttttgatgtgaaattgcatatgccttggttaggcattgattgtgagactgttgttggcgggagccacagacctgggaaggaattgctgactgagaccttaccaggtaagttcagtgtctctgggggatgaattcccatcttgtgtgccacaccacactccgggggagtggtggtcatttcatgatgcatgcattggtagttgcatcctcataatgatgtatgtatgcatatgtgcttgatattgtgctgtgatatgactgtgatagatctgttggccaatagatagatatggacctccctaggagatggttttcctcctagcatggctggctcttggttgaggtagctcccaggggattgattcccacaggccaggggattagaagttgaggtagctccttctattcttggaggtgccatatgttgtgcatccatgcgaagggttagcacccaatgggatggcacaggtgcgagttccggactcccactgatataggcgttgaggtagctccgccaggcgttgaggcagctccgccatgtttgtatgctatgcttatgttgttatgagggccagagagccaggtcagtgggccatttggttgtgattgcctgatgtatgtgttatggaagtgggccagggtggaggagaagcctccatggaccctgagcttactgagatttgttatctcaccccgtgtggggaattatgcttttcaggtgactcttctggacgaagagagcagtctcagggcaggaggcccgagtagagacgtttctgcttggctgatgacagcagatggagcgtgtaggctcagttttggattattttgtttatatatggtacccttgagaagggatggagtgtgtgtactcctgatgatttgtatagttctgtataccctgtgagggctgatattcttttgtatcaccgatgaggtgtgagtactgatatatatatttgtacagaactatttcttatatgtttatgagacatattctcccgagtatagctgtggtatagtgatatatctgcctatttctgatagatatctgtctgtatggtttatgtgttatgagaaactggatcagcaggggtgtgcttttatgctttgtgtgtgactctgatgagttgatgttgtttcatacataatgtatcaagaaaagcgattctgtgcttccgctgagttttataaactatgttttaaatgttaaactgatattattaatgataacacgtcggaggcctactgggtgttacagactgcgttccaccaatgctatcaatgaaggttttatgtcaaaatgattagcttgaattggtggcctcacaatgccggagttggatcttgtgaacataggagccagaatatcctccattagttcatcctccggtctcggctgattatttctttgttaagccatctctgcttctgactctaattcaggaattgaatcaaagtcaaagttttctgcttctctcctcctttgtctggctagtctacttcggatggttctttcaatttcaagatcgaactgtaaatcctcagggttaactgaaccttgcataaaactcagagaagcgattagtaacaaaaattccaattacaaagattaaaaattactgtaaaaatccatttaccaatccccaacaacagcgccaaaaacttgttgcgaaataagcacatggcaagtgcaccactcgtttcaagtaataaaagtaggtaagtagagtatcgtctccacagggattggggtgaagttcacagtaatatttagtctaagtgattggaagtaaaaagaaataacttgtgaagaattgttgttgtgtgttgaagagttgaataaaaaactgaaattaaataagcaataaaataagttgaagtgttaccaatggaagaaacaattgtggtcaggcacaatccccaatgtttcccgagtatagctgtggtatagtgatatatctgcctatttctgatagatatctgtctgtatggtttatgtgttatgagaaactggatcaacaggggtgtgcttttatgctttgtgtgtgactctgatgagttgatgttgtttcatacataatgtatcaagaaaagcgattctgtgcttccgctgagttttataaactatgttttaaacgttaaactgatattattaatgataacacgtcggaggcctacggggtgttacagagaaccacaagtcaagcctattggttggttgaggaggaggtgggttagaggatgactcaccagtttttctcttggaggttctaactcttttaggggttaggttagacattatcacggaatgaaggcttgaacacagtttagacatagaagaatgcagaaaaatgcagagagatagaagatgattaggtgcagggacatttaggctagtaatccactatttataggcacacatgagaccctaaaacgtccataatttcaaaaatatagttgttggtgatagtttaatgacattgggtgcgttttaaaactgattgggcagttaaataacccataaaaaattgtcaggtaacgttcaatagcatgaataatcgattatttcgttaagtaatcgattattccagagcaaatgagccactgaaagaacacagtaatcgattatttctttaaattaatcgattatttttctcttggtcaaaggtagaagacgaccagtaatcgattatttcttgcagtaatcgattatatgactaatttcatgaattatacaggtaacagagcataagtaatcgattatcccgagtggtaatcgattattccagtgagccttataacttctaatggtgaaggtaatcgattacaaggcttaagtaatcgattatcacagtgagacatgcattcaatcacagaagtttaatcaatgtaatcgattattctgatgtgtaatcgattattccagagataggtgaattctggttatatgaagaataatcgattaccatatgtgtgtaatcgattacatgagtacaatttttaacaggatgtgatttttaatgaatttaatcgattaatccgttctttaatccattattacagtcaatacatcagttacatggcatttagcagctttttgcaatgttctaagtaatcattcattttgagacatatatggctttaattcaacacacaaaacacatatagaacaagctagataatgttactttcatcaagaatccctagcatattcctaagtgtataaaatctatcccttgataatggttttgtgaaaatatcagcaagttgattattggtgtcaatgaattctacatttatgttaccttttttaacctgatctctgaggaaatgatgtctgatctcaatatgctttgtccttgagtgcattattggattctttgatatgtttatagcacttgtattgtaacatagcaatggaatttcattcagttctactccataatcttgcatttgttgtcttagccacaagctttgtgcacaacaactttcagctgagatgtattcagcttcagcaatagataatgcaacacaagattgcttcttgcagtgccatgagattaatgaacttcctagaagatgacaagtgtcacttgtgctttttctatctaatttgcaacctgcaaaatcagaatcagaatatccaacaatattgatagaaacacctttaggataccaaagaccaactctaggtgtagctttgagatatttaaggatccttttgacagcagtaagatgagactctttgggatttgcttgatatctagcacataagcaaacacttagcattatatcaggtttacttgctgttaagtagagcaaggatcctataataacctggttttttttttaaaaaaaaaatcccatgctaacagggtgggaacggcgcagttagcgtgggatgcagcgccagtagcgtgggatatggcgccagtagcgtgaaattgcaccagaaggccatttcttgctgcctgatggtgcagatagcgtcagtttggcgcgattagcgccacagacacgcccagttggcgcgattagcgccataaatgcccaggaagcttttagttgcgctaatttggcgcgaatagcgccatatatggcgcgattagggtgggaacgtcggcagaaccagtacttaaaggccattttacgaaattttggcccaaaaatcgtggtttcttcttccccacgccccaaacctccattgaagcttgtcccatgccttttgtgaccttatatcttggcctaaacacctccttatgactgttgaacttgagagaaacatttggaaagctgtaatccttcatttctgctcttgaaaacccctttgtgagtgagaagtggaatctcaaggaaaagctcagagaacttgagtttggcgaagacccaaggcgtgttaaggacaccagggctcaaggaagctgtcctgaggtctttctagttgccactgagctaagaaactcaagtttctccagctattttagaatttggggtttcctgtgaatagtgacccatatgagctggggttagaattagcccagggtcctgtagagaaacttgtttagaatggtttagtgatgaaggattagctttcagtttctgatttagagaactttgaatcatggctctgtgtaggcatgtgtgactgatgtagagtcacttgttgttggttttctgacatgctagagccttgattatgattgttatgagcctgaaaggctagatgaatggtgctttgagtgagactcagaccgttccagtgatatttgaattatgggctaatgttggctagagcttatatgtataggctgtgcattgagtctgggatgactcagatgcttggtatgcagccttgagaaaccttgtaaaggattatgatggcctggtgtgcgctgggctgaaatagttgaaccctaggataggggaattctgtatatgatatgttctgtgtttgaatgcctgtggattggttttgatatcagtatatgccttgattaaggcatgatattgagactgttggtggcgggagccacagaccagggaaagaactgtagagtgatactttgccaggtaagttttgagtccctgggaaatgatttcccacttggttgcacaccacactccgggtgagtggtggtcatactcataatgcatgcattgattgtcgcatacttatattactatgtgtgcatttgtgcctggttgtgctatgaactgtgaaaggcattgagggttctctaccatgtattgagggcattgagggttctctgccatgtggaacggcattgagggttctctaccagggcattaagggttctctgccaaggcattgagggttctctgccgtgggtgtggagcagataactgctcatgtgtatgagggtcagagggccaggccattgggccagatatgatgtgtgtgcttgtctgatgtttgtattgtgaattgtgggccagggtggggatgatttcccaaggatcctgagcttactgagatatgtatctcaccccgtatggggaattatgatttcaggtgactcttcaggcagaagagagcagtctcagggcaggaggcctgagtagagacatttctgcttggctgagagcagcagatggagcttgaaggctcagttttgattttgtttatgttttgtacccttgataagggttgaatagttctataaaccctcggtgagggctgatatgatttgtatcaccacggtgtggtgaagatactgatgtatatggctatgtacagaactatttatgatatgtttatgagattcctcctgagttcaattgttgtatatttgattatctgcccatgtattctatttatctgtctaaattatgtatgagatgagaaatagatcagcagggatatgttattggccttgtgcttgtgctgttgttatatgttttattccatacataatgaatcaagaaaagcgattttgtgcttccgctgagttttaaattgatgtgttaagtgataaactgatattattaatgataacacaccggaggcctacggggtgttacatttaatggtatcagagcggtttcttgatctgaacattatgtatggaattgattggttgtttgacatgagcattgcatgggggtacattaactgtgggcctgatccactcactatgtgatgtacatgtgtagtgccatggtgagacctagaagcaccagtggggctaccagtgcccagactgatccagttgcggctgcactagccgccacgcagcaagagttagctgcaaatagacagatacaggcagatatgcagcaagagatggctgctaatagacagactcagggggagatgcagcgagagatggctgccacccgagaggtgaataaggccttgatgaaggctaaccaggacctgctagaggaggtgaagaaccttaggagggatgacagagtatcctccaaacctcctgcgcatgagggcgaggctagtcgccagcaggctggtgggagccaccagcgaggggacctgatttcccagatagaggctgagagtgacgcagcagccagagggaaaatgcttattaccttccggaagcatgaccctccagtgttttcagggggctatgatacagtggctgcagcaaggtggctgcaagccttagagaagatctttgaggtgatggagtgccccgatcaccagaggttgctgtatgcaacctatatgctccatgatgacgcccatgagtggtggaagaccacagttcaacttctgagaggccgggaagagatgattaccttgcagttatttgaggcctgcttcctggacaggtattttcctagagacacccgggagcagaagcaggcggagttcgatagtctcgtccatgggactatgacggtggacgagtacctggcccagtttaatgagctggcccagtatgcacacttcaggaggcctttgcctgaagctgagattctagcagctaagttcctgaggggacttagggatgacattcaggtgctagtggctggtcttgggtcacgagatatggataccctgatgagacagagtcgccaggtggagggtatcctgcagagacagagaggcagacagcttgctcccttagacagacaggaagggagaaggcccagcggttctggcccacccgggaagggtaagggaaagatgttgagagtctctgcaccctctgacagattcaagaggggttcagctcggggaagacctatcccgaaatgtccagcctatggaaaggagcatttgggagcatgttctacaggccagatcatctgtttcagatgtggcaagccaggccacatatccagagagtgccctcagacagagagacgggaacaggttgctccattggagatgacggcacccatagcaggacgggtgtacacagtggatgccagagaggcagctagagctccagacttgatcagaggtacaattctgatcgatgactgtgatgtgagagtgttatttgattctggagctacacattccttcattcaggatgtggttgttgataggctcagattgcctaagttcagttttgtccctccgatggaggttattactgcatctagagaaagatgccaggtgagcacgtgttgcaaggacgtgcagtttgtgtatgagggcagagcctatgtgatagatctgttttgtctagcgatgcctacccttgagatgattttgggtatggactggatggccaagtatggcgtgatgctagactgttgtcagaagagggttgttgttccttctgacaagacaggttcgagtttcacctcattcttatcaatcttgcaagctcgcaaggcgatcatggagggagctcagggctatatcttcttgggtgtgacagaagataagccaggtgttgatttgtctcaaatccctgtggtgagcgagttcatggatgtgtttcctgaggagataactcagctaccaccagagagggaaataaagttctctatagatctggttccgagtgtgggaccaatttcggtggcaccttatcgtatggctcctctggagttgagagagctgaaggtgcaattggaggacctgttgcctaagcagttcatcagaccgagtgtttcgccttggggagcaccgatgatctttgtgaagaaggacgatagtatgagactttgtgtggactacaggcagttgaataaggttactgtgaagaacaagtatcctctgcctcgtattgatgatttgttggatcagttgaggggagccagagtgttctccaagatagacctgagatccggataccatcaaattcggatcagaccagctgacatacctaagacagccttccggtctaggtatggtcactttgagtatcaggtcattctgtttggtctgacgaatgccccaacagtgttcatgaactatatgaacagggtattcagacctttcttggatcagtttgtggtggtgttcatcgatgacattttgatctactccaagacgaagacagagcatgccgagcatcttaggacagtccttcagattttgagggacaagcagttgtatgctaagctggccaagtgtgagttttggatgacagaggtgaagtttcttggccatgtgatctcagcagctggtgtatcagtggatcccagcaagatagaggtagtgatgtcctgggagaggcccaaggacgtgtctgagatcaggagtttcttggcattaactggctactacaggagatttattcaggggttttcctagttggtggtacctctgactcgactcacacggaagggggttccatttgtgtggacccatgagtgcgagcaatgcttccaagagttgaagaagcggttgaccacagctccagtgctgactcttcctgaccctgagggagtctttgaggtgttttgtgatgcatccaagcggggacttgggtgtgtgttgatgcaggataagaaggttgttgcctatgcttccaggcaactgaaacctcatgaagagtcttatcctactcatgatttggagttggcagttgtggtgtttgctctgaagatttggaggcactatctgtatggtgccaagttgatagtgttcagtgaccacaagagtctcaggtacctctttgatcagaaagagttgaatatgagacaaaggcgttggctggagttcctaaagaactatgactttgagctgcgataccatccgggcaaggccaatgtggttgttgatgctttgagcaagaagaatgtgactgctgcatgtttgatgatctctgattgcagattgattgagcaattcagagatatgcacctaacggtgacagaaggtgcacatggtcttgagttgagcaggaccaaggtggataatgagctgatcaggaggatccgagaagctcagcagcaggatgaggctgtgagggccatgattggccaacaggatgtttcttgggaggataacgacttggtgatgtaccaaaatcggattgtggtgcctaagggcgagttgagagatgtcgtcctgtctgaggcacataagggccagttcaacattcatccaggagccaccaagagaagagaagtttctggtggccaggaatgaagaaagacatagccgagcatgtggctaagtgtctagtgtgtcaaaaggtgaaggttgagcatcaaagaccgtctggtctgcttcagcctttatagatccctgaatggaaatgggatagcatttccatggattttgtggtagggttaccgaggactcagagtggatgtaattccatctgggtggttgtggacaggctgaccaagtctgctcatttcttacctgtgagatcagactacactacgaagaagttggcccagttatatgtgaaggagatcgtgaggttacatggggttcctaagagcattgtcagtgacagggatccgaagttcacctctaggtttttgggtgctcttcagaatgcttttgggacccaattgaggttgagtacagcttatcatcctcagacagatggtcagacgaagaggaccatccagactctggaggatatgctgagagcttgtgccttggagcaaggtactagctgggacagatatctacctctggtggtgttctcctataacaacagttttcatgccagcctgggcatggcaccatatgaggctttgtatggtcgaaggtgcaggactccagtgtgttggacagaggtaggagagaagcagctccttggatctgaaatggttcaagaaacttctgagcagatcaagatgatcagagacaagttgatgaaagctcagagtcagcagaggagctattatgatcagaagcatagacctttgcaatttgaggagggggatcatgtgtttctaaggctatctccagtgacgggtgtaggacgagctttgggtgtgaggaagctgagtcctaggttcattggtccatatcagatccttgagaggataggaccagtggcatacaggctagctttgcctccccagttgtcagggcttcatgatgtgttccacgtgtctcagttgaggaagtatgtagccgatccctcacacgtggtagaaccaaacacagtttagatcagacagaatctgacgagtcctacacctgaggattctagaccggatggagaaacagatccgaagcaagaccattcccatcgtcaaagtgcaatgggaagacaggacacctgaggaggcgacttgggaacgagagcaggagctgatgcagctataccccgagttgcttgacaggtatgtctctgaattttgcggacaaaattcttaaaaaggtggggagaatataataacctggttctttaaaaaaaaaactaggttattatagatccaatcattcctctgaacctagactcatcaactttctttccactttcatctgaatcaagatatgttaatgtagccatgggagttgcagcatccttgcttttctccatttcaaatttcttgatgatttcaagacaatacttggattgattgagaaaggttccattcttcatttgctttatttgaagtccaaggaagaatgttagttcacccatcattgacatctcaaattctttctgcatagctaatgaaaaatccttgcacaacaagagattagtagaaccaaaaattatatcatcaacatacacttgaaccaataagaaatcattgccatgctttttgataaacagagttttatcaacactgccccttgtaaaagattgatcgagcagaaatttgcttaacctttcatatcattgtctaggagcttgtttcaaaccataaagtgcttttttcagtttaaaaacatagtttggatgtttgaaatcagtaaaaccaggaggttgttcaacatatatgtcctcctcaatatattcattcaaaaatgcacttttgacatccatttgaaaaagtttgaaattcatgagacatgcatatgcaagtaataacctgattgcttccaatctagcaactggagcaaaagttttttcatagtctatgcattcttcttggttatagcctatagctaccaatctagctttatttctgactatgattccactctcatcaagtttatttttaaaaacccatttagtgccaatgggtttaagagatgaaggtctaggaacaagttcccaaacttcattccttttaaactgattgagctcatcatgcatggcatgcatccaatgttcatcattcaaggcttcatcaatgttcttaggttcaatttgagaaacaaaagccatatcacagcaaaggctctttaatgaagatctagtagatactccctttaaaacttcacctatgatgttgtcaagtgataaatctcttgttgttctccaatctttaggcacttgaacaggagttgtggattttgcttcagcacttggttcttcatttttggttgaggttttatccatttcaataaattcttccagttgtcctgcatcaccatcaatttctttttcctccttagagggattagtttcatcacaaatcacatgtacaaattcttcaatgcacattgttcttttattgaatactctatatgccttgctatgcaatgaatatccaagaaaaaatgcttcatctgccttagcatcaaattttccaagtgattctttcccattgttcagtacaaaacacttgctgccaaatactcttaaatgagaaatgttaggctttctacctttgtatagctcataaggggttttctttaaaataggccttataagtaatctattcaaagtataacacacagtgcttacagcatcagcccaaaagtatttaggcaaattagactcattaagaagtgttctagttccttcctcaagagatatatttttcctctccacaacaccattttgttggggtgttcttggagctgaaaaattgtgattaattacattttcctcacaaaatttttcaaaatgttcattttggaattcaccaccatgatcacttcttatagagataattttacaacctttttcattttgagtaagcttggccatttttctaaaagcaaggaaggcatcactcttgaatttcaaaaacagagtccaagtgtatctagagtaatcatccacaatcacaagtccataataattcccacctaaactcattgttctagaaggaccaaacaaatcaatgtgaagaagttcaagtggtctagatgtagaaacaatgtttttactttgaaaagagttctttgtttgtttccccttttgacaagcatcacaaagtttctccttctcaaacttgagtttgggtaatccaattactaaatcttttctaatgagcttgttcatgtgatgcatgtttatgtgacttgctcttctatgccacaaccaagtttcatcaactttgcttattaggcaagaagatttatggaatgatgcatgatcaattgaaagcacatatatattacctttccttttacctatatgcactacctcaccacttttatcatcagaaattatgcagcattctttgttgaaattcactttaaagcctttgtcacacagctgacttatgctcaataaattgtgctttaaaccatctacatacaacacattttttatcttagctttgaagttgtctccaatattaccttctctaataatcttccctttgttattatctccatatgtgacatatcctccttctttgagattcagatttgaaagtagggacatgtctccagtcatgtgtctagagcatccactgtcaagataccaagttgatgttctagctcttagacacacctgcaaaattcaaatcagatttcaagggaaggtacccaattgaagttgggtccataggggttagcatttttctttcttttaggaatccaaatgcaatcaccattaggcacatagaatctcctagcatagcatttgaatgatgagtgccccttttccatacaatagttgcaagtgaaagattttgaagttttcccaaaaccagaatttttttttactcttgagttcttttgccacttttgattcttctgtttttgaggtacaaaatctgtttttccagctgatcttgaaccatgtttataccccaaaccagaagtatctccagcatatttttgcatactaagcatttcagctaagttgcatttttccttgtaaaactttctcaagagatcaattaaatcactgtttttggctaaaagcaacatatattttcttccttgactttgtttatactcatcaaaatcctttgaagcaagttatacttgtcaacattgctagaggaagaagcacacacacatccattcaatttgtaacttgaaacaagtttttcattttcttctttcaagttgcaaatctcattttgcaattcagtaattttttcaatatgccatctaagatttcctttgagcttattattggattttgcaagtttttgggcttcctcatgcatttcttgaaaagcatgaatggcttgatcaagttcagaatttacctcatcctcatcacttagcaaatcatcatcatcttcattgatggtggaggtgagacacatgttagctttttcatgttctgtgaaagaatttgaagttgttgactcatcatctttccaagctatgtatgctctttttgcttttccttcctttttcatcttgctttctccttgttgcttcctcaagtagattgagcattcagatttgatgtgacctggtttgccacactcaaagcatgtgaaattgttgtcaatcttcttgttgaggttgttgttgctactactgttcttgctccttttgttgaactttttattcttgtttttcttcagaaatttgctgaactttctaaccaccaagttcacattatcttcatcatcctcttcacttgtttcctcttccttttcagctttcaaggttgcagcttttaaggctatgcttcttattttcttttctgcatcttcacaagatgttaattgagacatttcaagttcatattcaagaagcttaccaaatagtgcagccatagacatctttgatagatccttggattccttgattgctgtaacttttggttgccaaggtcttgtcaaacacttcaatatcttgatgtttaactcttcagtgtcaaagacctttccaagacccaaaaggtgatttacaatatgagtaaatctggtctgcagctgagaaatgctctcattggtgttcatcttgaacatttcatactcatggatcaaagcatgcttccttgatcttctaacttcctcagttccttcatgagtaatttcaagcatctcccacatttcttttgcactattaaatctcacagtcctgaaaaattcatcagaggaaagtacagaggtgatcatatttttagctttaaaatcatattgtgcagccctttgttcagcctcaatcatctcatcccattctttgggaatcaattcatttgccacagttttctctggaataaaaggacccttcactattgcattccatgctcctgggtcatttgattgaataaagatcttcattctattttttcaaaaactgaaatgttccccttcaaacataggaggtctgtttaaagaagcaccctctttaaaggttatttgtgaagtattcatatttctttttgaaaagaaaaagtgatcttgagaaactttcaagaaccagctctgataccaattgaaaataataggaatacttcaatacaatcaagaagggggtgaattagttgtaccttggtaaattaaaattttcaaatcagagtttccacaagatctttatcactttaaaaaaatagttttgaaaccaagaatcttatattcaatcatattcctctgtcaagaaatcaagaagcaaatgagagttttttgtgtaatgtaatttgattcacaaccaaagaaattgagagatgaagagataagaataaagatcagccacaaattttatactggttcacttcaaacactatgaagctacatccagttcttctactcaacactagagtagagttccactattgcaaataatattcttacaagatattacaggcctctctttattaaccctagataaagtttagaagtctaaaacactattagacctgtaacaccccagacgtctccggtgcgttatcattaataatatcattattgcactatcggcgttatatacacgctgtgcagaagcgatagaatcgtttttcttgattacattatgcatggaaatatacaacacacacaaacactataacacaaacccctgctgatccagataacataacatacaacaacataggcagaaagcatataaaactaatcagaggtaatcaggaggtaacatactattataccacatcatcatctgtacatatacatgctcaaaacaaaaccacacttgtggttatacaacaaactatgtacagtataatgggcgtacacacaccctaccactacacaaagatctaagaccagcttcaactcttgaagctctgctctggtcctctactgcagccttctgtccagcatgcaagctctactaaggcctcctgccctgaggtcggtcctctcttcaagaaacacctgaaaaccacaaaccccacacaaggtgagacaaacgtctcagtaaactcagggttctgggagatccttcctgaccctagttcacctccaagcacaaccataacaaagcctaggatattatcttggctatcatacatcccagctatctaggtcataacgctggatgctatcagcatcagagatacacacctcctgatggctctcacaaccatctgtcagagatcaaagccacatcatggcatcaggatctcatactggctcttatagcccgtctcacagaggtactctaacatcagtgtcaaccaccggacattgtccatattagagaggcaccgcctccagaaaccatgtaaccaatgcctgaacccaccattcaggactttacatatccagatatggctcatctaagaggctctaggctcttatcccccccccgggatgccctctcttagagatacaacatatccgcgtatcatctggcctgggaaaaaccctccaggactttcacaaacactggcctgggaaagaacctcctttacagggcgatcacatccaggacttttcaattacgtgcctgagagacaatccacacagggagttctcatccctcagggcttcaagcacatgcctaaggataactactcaaggcttccaatatctctgcctaaggagaaacgtccatacaaggcaatccgtccttaggacttaggtggagagcagtggcacctcccaaggaatctcagctattccaagggagtcctcaaactcttcctctggctagggaacctcaactagcctgatactattccagtatcctatagattccatcacagatcactccctgatctgcattctatcaagatcgctgaacacctaacagtgtccatccatcaaaggcccgcggccactcacacctgccatatcaggtgtctcattaccctcacactgcctcagtgtctatcctagggttcatcatttcagcccagcacacactaggccatcatataatccaatatatctggaacggtctgagtttcactcaaagcaccgttcatcgagcctctcaggctcaccataaacatatatatatatatatatatatatatatatatcatccatcacccacttgggtggcaaaccaaaataagggaaaaaccccagaacaatgagcttacctggcaagccgtgcctcacagctctagcctcgaatgatggtctgctcctctcacacccacggtgtcaagccctaccaaggcatacaaacacacatcacagaccattcaagcatataatcatgcataagctcatcaagtagtcatcaactgcctctggcaaaggaacctcagtcctttccatcaacccgagtcatctactctagggttcatcaggctcatccctcacaagccttctcatagaccctcagcggtctatctcagctcaaccatggcctcagagtcattctagactcagcacaagcctttcaccatgagcatctcagctctcataacccaaatacacagggtttccatagggcttggacgatctatctcataagacactttctccatggcctctcaggcacctcaagcccctcatcttggctcttgcatgtctcaaattaagtgactcagtccaagtcacacatgcataacctagagccagaatcaacagtcaccaaaccacaaactgaaagctaatccttcctcctctcatcatgccaaacacatatcacaactggacccaaggctaattctagctctatcacagttgggtcactattcacccaaaaccctcaaatcatatattaaccggagaagctcgagtttcttacctcagaactgacgaggaagacctctgggctgctctccctagcctgagcgtccgtggaagcagctaatcctcgcccaatctcgagttctcttcagcctttctcaaaggaggagtttctctgggtttcaaagtttatggaggaaggattcttgctctcacttggtttctaggggttttaggcgttcaggaagggatttgggtctcaaaacaaggacatggaagcttcggaaggtccagcgatggaggaaaggctcaaggaggaagagaaatagtgtttctccctcaaaaatcgcgagccttctttatatatagccaacaccaacattgtcgcgcgacccgcgccaattcccgcgctatccgcgccagttgcagaaactgtggcgccattagcgccaccctggcgctcctagcgccagcttccagagactctggcgcgctcagcgccaatccctagccatcagcgctagattcccgaaacaatggcgccacaagcatgatcctggcgcccctggcgccgtcttcctgtggctctggcgctacccgcgccagacgtggcgccatccgcgccggagttcatacacaggttcctctcttcatatcctggcgctaaccgcgccgctcatggtgccaaccgagccacctcttgaaggtccttacaagacccttagagaccaaacccaaaactgagaacactactcagtaacccttagagaaacactatctctaatcatcatgtaagaaacccatttacaataagccaatctttacagaaatcaattaaaagatttacaccttcaaagaataaggaaagattttacctgataatccaaagaacacatgcaagtgaatgattcaacaggttgaaagaaagattgcagactcaatgcattcctttccttaagctttgagactcaatgatgcttcacttcttcaaataaaaaaacccatacgaatttgtgaagcctaaatgctttttgaaactcagaaatacactaaagaaagctcatgaatgtttgtgattgcccaaaatacgaattattcagtcttacaaagcatagggcaatgggttcaatttataacaactttctaactgaaaataatcgattaaacacgctcctgtaatcgattatttcgcatttgtaatcgattattccaagaatgtaatcgattaaagtgctcctgatatgttctgggtttgagctatgaacaatgtaatcgattattccgtaaagtaatcgattaaaccagacactcaagtttttccaaatgcactgagtaatcgattacgaaatttggtaatcgattaagacagacagaccaatattttcaaatgtactgtgtaatcgattaaaacaatatgtaatcgattaaatcagtagaacatgttacccataggcattagatgtaatcaattacgaatttctgtaatcgattaagacagtcagtatgatttttccattttagcctatgtaatcgattaattcgatatgtaatcgattacaatgttcttgatttgttttccagaaggcacgaagaacaaaataatcgatgccaacaatgctgtaatcgattaatgcatgaaaacttcatttttccaaaaactttgattttaaaatgccttactagttaattgcttttatttagaccttcaatctaacaatcctagatgaatgattatgcatgatatgctagttggattatcagataacacatcttcccttttacatgaatcaaattgatcttcatagcttctttggcacttttccaatgaggcatgttgaaagcacaaaacaccaaagcttgatccttgttcattcatgcatgactcctcttgaatcaacaatgactagtccatttttgatagacccaatgagaatttgatcgagtgaaaggaaataatcttttatagctgtaaaatatgggaacactttgtaacgccccaatccgctaatcagggtcattaccaaacatcaaccacaatcaaacagataatcaatcagagtttaagcagtttggaagcatatactaaaagtgacatcatcaaatgtcatctgtataacactgtacactataatatggtgaatatacatacgagttcctctgtacagtacaaaactatacaatatcccctcagggtacaacaaaatccacatctaaaacaagatacaaaacatctgagccacatgctcatgttctctagcctaaggtgtccatcagcagctaatcctgcataggcttcttgccttgggatctctctgctactctggaagaatcacctgcaaaacatagtcccacacaaggggtgagatataaaatctcagtaaactcagggtccttgaaggtatttccttcccctggttcactgacaacacatatatatatatatatatatatcaaccacaatcacaatcatcatcagtgaatcactcaatcaatcatcatgcacgatacacctgaccacaatcaggttatacacatccatcagccaaatccaaggcacactcatggaataaagccatgcatcacatcaataactgtcatgcagaggctacatctatagtatataggaacatctcctcacagggaggctacctctatatactcggcacatctcttgcatgtatccctagcagaggcttcctctgaatatataggtacatctccatcttgaggcttcgtctatatatcaggtacatcccctttttggtgaggctacctctgtatacataggtacatctcttatcacgaggctacctctatgtatcacagggtcatctcatcctctaacataatacaattgcctgggaaggctacctctgtgtatatgggaacatctccacgtaggaggctacctccatatcacaggctcatctctcaccaggtctttctcaatctcaaatcatctatcctactacaataggatactattcaaacacagcatgcataatcaggtttcacattcaaccaggcatgccacaatcagtcacatcatagccatgcatattaatcccctatcatagggttcagttcacatttcaagcataacagattaatacatctcaatctccctctcatagggatcagaacatcagtacacagtatccatatacatgcatacccaagtttcataatcaatcaggcatgctaccaacccacacattcatacatatcaatttccctttctcagggatcaaatacgcatcaattccctttctcagggatcaaatcatcaatcacaactcatagttatacatcatactcacccatctctgggttcagatcaaatataaagcatcagctaccctttcatagggttcagacaacatctaccaatcattcacagcattatacacgttcctctattagcctaaacacatatcataaccataatcccagtggatatatggtggaacgcagcaaaggatacacaaacaaaaaccaagagcttacctgctctagacagctcaccggctctcccggcctcgtggtcaacaccaccagagctctcaagctcacgtcctacacaagacaagcacatatacatattaaatacggttctagaccgttcaagcgaaagggaactctcatcctttctataaacataaactaatcactgtacaagtgatcatctgatcctcaacaggatccctctcagcctatacaaggctacagagcctccaccaagactctgatcaagctatggtcaagcatattcctgcttaaaaccaacttctcataatcaccagtttcaaccggtcaatctcatctatatcctctcatgagcaactttgtcaactgctctaaggtccagactcgtcaactagtcaaccttttatctctgctcagactgactcagagccaaaatcaaacttcatcagtaatgatgattcaaggctctaacctcctcagaacagtcctctgagcataagactctacagagtccgagcctaataacgactctaacacctccaaaaacacccctcaagataaccccaaaaccccgaaatccaatacacagaaccaacggttagagctcgagtttcttacctctgtgatgttcagaaacaccagggaatcgctttcccaagtttagatcgctcaatcaaagcttccttcgcctttaaactccaagctctcaagggttctctcagagaaatcaaatctcactatttctcagctattctcagggatcaatcgggggttttctctcctctcagggttctaatcactttctcagttgggtcggaggtgtttagatgaaagatggagaagatacgaagctctcaaactcatcaatggagatttggacgaaggaggaagaagaaaggaagaaaaatatcaagattttcgagtttctgggccttttataggcctctgccgtgactcccacgcctccagcgtgggctcccacgccccaagcgtggcgttccagacaaaattccacttctgggaaacttcccacgcctccagcgtggcttcccacgccccaagcatggctttccagataaaattcaatttctgggccacttcccacgcctcaggcgtggctcacagcaaaacccaaaaattagctttaaacatgccttttaagcttcctttcttaggaactctaatccataagcttagatactaatctcaaggcttaaaccaggcttaacctgtgttaatcacatgcttaaaattcaagatattacacacttcacacttaaccaagaggggggggtgaattggttagtcttggtaatttaaaactttttggataatcaaaatcagagttttttccctttttggatctttatcacaaatacaaccaagaacctttatccaggatcaacccaagacttgtaatacttcaagaaacaagatataaaacagaattcataaagaaaacaatcaaatatgcagaatataaatgaacacacaagaattatactatttcacttcaaacactatgaagctacatccagttttcttctactcaacactagagtaaagttccactattgcaaataatattcttacaagacaattacaaacttctctttatcaaccctagataaagttcagacgtctaaaatactattagacccttagaagccaaaacccacactgagaacactactcagctatccttagagaaacactatctctaaccttgcaagaaacccacttacaatagaacttcaaaaatcaaagattcaacagaaagtttacaaccacaaagagtaaggaaagaattcacctgatgatccaagaatgatatgcataaggatgaaaataccaggttgaatgcagaaataatatgcagaacaagcctttccttaaactttgagaagaattgccttgcttcactaaattctaatgacccatatgagaatcaatggaagcaagagcctaaggacccagaagaaagcctttgtgaatgcttagaaagcttttagaatgctcagtgttcgaaaattcaagttctacttttttctactaatcagaaaaggaatgggttctatttatactaaattctgtaactgaaataatcaattaaaagcgctccagtaatcgattgtttagcatatgtaatcgattacacacgctcctataatcgattaaaccgttcatagcaatatctgggttacagcaacgggtcatttaacgattatcccgtcatgtaatcgattactccagaagtcctctaaaatcagtttgcactgagtaatcgattacaataatcggtaatcgattaaagcagacaaggtgaaaagtcatgtttgagtaatataatcgattacaacaaatggtaatcgattaagacagtctaagtgcaaaacatgaaatgaactaaataatcgattacgataagtggtaatcaattaagccaacgtgaccactttttctaaataggcatgtaatcaattatggatcagtggtaattgattaatccagtcactcagccagatcatatgtatactaagtttgaaataatcaattaatctgatgatgtaatcgattaaattgttcatgataattttccaaaaagcttgaagaacaatataatcgattctttgtgtgtattaatcgattaaaccagcttaaggctatttttccaaaacacttagcttcttttaagttccaaaaacaattacttaaagcctttgtgatgaaatgcttaaatgaatatgaatggtatgcatgcaaggacttggatcaacagaaagctttctttccttttacatttaatcacaatcttcatcttcaagcctttaagcatgttgaaagtcaaaacacttccaagtcttcaagttgcatcaatcttcaagtagctccccctcaaatcaacaatctccccctttttggctttaaacatgccaaatttaaaattgaaaagcaatgggtcttgtgattaaatggagagacttcataccatttttctacacatgcttagctcctgaaaaattcaaaatcctttgcaagaacaagtgttaaaggcatctatttttaacttagcattcattcctaacatatctttgtttattgcaatcaatttaagcacttaactccccctaacttttccagattatgcagctgaaatttcaattcaaaaagtgcacaaaaaacaggggcaaatagagtatgatgcagagcatgttgattttcaattattctccccctatttggctttttaaagacaaaaatgtaatgtacagtggatttaagcataaacagaagcataatagttcattaatatggagttaaggagtacatattgcattaagaaagaaaactaaaaacagagtacactgaaacataaaaactaaggtctaaagttcttcagattcttcatccatccttagcgtagcctctatgccatctagcctctcattaatctccctgaatgagccttgtttaacatacagtccaaatacaatatagtcccaaatagtttgttacacgataagatacatacagctcaacgtagcatcaaatatagacaaccaaaaaatttcaaatacagcatatagaatatccaactccttcctcaatgatttccttagcttactattcctctgtttgcctgatgtgttgcaaacacatcttatttctagcttagttttaggttatattttaactaaatagttaggaaatagtttcaaaaattagttctttttagtatttttaattgttttaagcaatttaataccaattaagtatttgcaggtcaaaaagaggaacttaagagaaaataaaagaagaagccagattctgaagagtcgcgcggttcgcgccacacccgcgctagtagcgtcaagtccaaaattgaagaacaatcattggaagacaccacgcgataagcgtggaaaccacgcgacacgcgtgggggacccgagagtatcacgctgacagcgccattaccacgccagtcgtgccagaacctcaaggattaagggttttctcctctgccaaccagcgcgaatagcgtcataagtcacgctggtagcgtcataacttcaaagataaagcctgtttctttctgccaagccacgcgggtagcgccatacatcacgcgaccagcgccattctttctgtcattccacgctactagcgcgagattgcgcgcgggtcgagggaggtcgtatttgtttcctgttttaaaaagatatgtttcgaaattgggttaggcttttggcttagttactgtaattaaaaggttctatatatatgaggcctctaaacagagtaaagggggatcccttttacatccatagcatctagaaaatagagaaaacatccagaaattatcattgcaaaccttaggaatcaagattctgatccaaagttctgcacaacaatgtttcattcatttgctttggtgttcttgaggcctatggcaagctaagcttctgttgtgggaaggccatgaacttatgagttatcctctgaaatttgactggtattgaatgcatatgttttgtttattttacttcttttctgtgcttatactttatcttgtttagaattgatcactctagatgagtactgagagttataattcacaaatgacacgttggggttgtaatatctgacttgttaagaataacacttgttcttcacctagacataggtatgcatgagtgcggagcttctaatatgttctttaattgcttaaattgattaatttcattaagacattaggttatgacttcagtttaaagggttgattcactaagaaattaggggttaactaatataggaaagacttattctccgagtaatcataacacgaacccatatgatttattctctaaatgcttagtttgacggaatcgctaaaggtttagggttctcgatcgaattaaagggtgaaatcgctagttatctaggatttacaaatataggagagatattttatatgtgaacttcaagttaacataatcattcaagtgaaagaggtaatgctcataagggattgtgcctgaccacaatacttactcattggtaacttcctagtttaaatttactgctttgttttaattttcgtttttaatcaacacaatcattcaataactctctgcgtaatattctgttttctgttttcaatcacaattgtttattacttgtaaacgatcgatgcacttgccgtattcattcgtataaatcgtaacacaacaagtttttggcgccattgccggggattggtaacggatttcacagtaatcttaattttgtgattgaaactttttgttactaatcgcttctctaagtttttatgcgaagttcagttggctctgaggagttggaattcgacccagaaattgagagaacactccgaaggaggctagctaggcaaagaaggagaaaagctgaacaattcgactttgattcacttccagaatttgagtcggaagaagaaatggcggaagaacaacctaatcctccaagaccacgaccggaagatgaactaatggaggatattctggctcctatgttcacaagacccaactccagcattgtgagaccaccaatccaagctaatcacttcgatataaacccttcattgatagcattggtggaacgcagtcagtttggaggagatgattcggaagacccacatgacttcatagacagattccttagaatctgtgataccattagacaccaaggagtctacgatgacgctgtgagattaagtctatttccatttgctgtaaaaggacatgctctgaggtggctgaactgtcagacatctaatagcattgcaacttgggaggatttagtttcaagatttttttcagagtacttttccatggataaatacaatagattggtgaatgaaatcaccaacttcactcaaaatggaagagagtctctgtgtaccgcttggaagaggttccaagaattgatcaggagatgtccacagtacgatatgcctgtaggtaagcaggtaagaatattttttaatggcatgactcctgagacacgcatgatagtgaatgttgcagctggtggaactataaggtccaagaccgccgcacaaacatatgagcttattagctctttggcaaggaatgaaaatgaaagtcatatgcttcagccaaagagggagcctattcaattgaccactaatgatgcaatgcttgcagaacaaaagatattggcacaacagctagccaaattgaatgagaagatagataaattgcaagtttctgcagcacaagtggcggttaatcagccatacatagtttgtgagtattgccaaggtaagcacgaatctaatacttgtcctattcttgttggtgctgaccctgtgcaggtaaacggtgtttggaacgatcaaagaccgcaacaacaaccataccagcagcaaccataccaaagaaacaacaattatgcaactgggaacaactatcaaagaagatttcaaggaggtggtttggattacaaatccaataactacttgcaacctcctcctatcccaaacaaggaaccttctgagcttgagaaagtgatgatgcaattgtccaaaaccacagcagagttcattgcggaaacaagggctcaccggactaatcaagatgcttccatcagaaacttagaaaaccaaattggccaacttgcaaaacaaatggctgaaagatcacaaggtcaatttccaagtgacacagttgtgaatccaagagaacatgccaaagccatcacaactagaagtggtaagatattggccactccggaaaaacctgaaacaagcgctagagaagctgagaaaaattctgcagcaactgagaatgataaagataaagctgcagagaagttggaggagcaagatcctgtacctccaccaaagaagtgggatttttcacgctttgaaaaccccccatatccgatattgacaaagcaacaagagcagaagcagcaattcgccagattcttggagatgtttaagaagttgcacatcaatataccatttgcagaggcattggccaatatgcctaattatgcaaaattcatgaaggaacttctatccaataagaaaaagttgcaagaatgtgaaaccatagcactcactgaggagtgcagtgcaattattcaaaggaaacttcctcctaaattgagggatcccggaagttttaatatccctatagctattggtaatattgatgtagggagagcgttatgtgatttaggggctagtataaatttaatgccattgtctatgtgtaagtctctaggcatagctgaacttaaaccaactagagtatcgttgcaactagcggatagatccttaaggacaccctccggggtaatagaagatgttttagtaaaggtagataatgtaacaccccaatattttacttattgaatatggatttaaggaaatacttaaggacgattagaaaattataattcactatctagagagatttttagcacttcatagacattttgaaataaaattcaatttaagctattctaattattagaaaattttataaaagtgatgaacataatattaggagttttcttgtaattataagttaaatagacttatttattaagatggattaattttataaattaaaccaacaagtaaatatgatgtggctatttataagaaaacaagtgtagtattggtttttgaaacaaggctagccgggtgatcaagaatggatgggaaggatggaattattaataagtccatgtgcgaacaagctaactagaaaccaagccaatcaattagaaagaaaaagaaaaggtatatggcatcaaaagaaattggctacggtgaaagaaaagggaagcatatgttattggaacaaaaacatgaagtttgctacggtcaaagagaaagaaaaatctgaacagcccttgtatgcttgaatctcacgtaggatagccaaggaataaagaggaggtgggccaattcaaaggaaagaaaggaaactaataaatggtcaagcatggtgcagatttttttagaccaaaggaatctacattgaatgcaaggaagtaaaaatcaaattgacttcctccaagccaatatccatccgtgcaattgaaagggaacaagaggaataaacattaaatggcaaagaataaacattaaatggcaaggaataaaagtcatatggtcttatccctaagctcaccatccatgcaatcatagaagaggaagccttgatattttgacttagctatataaggaaagggagaagcaaaatttttgggtcagctaaaaggagaaaccgtgcagccctttcactcttcccttgattttgtgcaaagctttgttgaatccaaaattataaggcaccaaccgtgcacttcctaagcccactagttgcctttttgtctttagttttagggaattacaaagcattccaccgtacccacttctctcactttaaatcattttcacaaacattcctcaaggcaaagcaagttcacgtgggggaaggaatcaaggagcagctgttcaatttttgaaaaacacttgaggtatagggaggttttgataaatgaagtttaaatattaaactatacttaagatcactacttcaattagtaaagaattaagttgataaattgaaagagaaataagcaaaattatgatgggtgggaagagacaaataaaattaacttaattttctatttaatgcttaatggtttaaatttatattctagacaatattttgattagttgatagtatagatgatttttgactaattatatctagtaacatttcttgaattttatgtttagatagatattttgttacttatatatttgattaattgtgtgtcatgctatttttctaaatcatttattttagatagtcttttgattaattatgttgtttagatgtaatgtttaataaatcatagataaaatatagtttatgttccgtaagttaatttattttgaaaagaactttacataagtcttaacaaattattttgttgatatctattaagaaatcattttgatgttacttgttaaattttgatttatctcattttattgatgttgtcataactattctaactcaatcaagaagatattatgaagtagataattagaagtttggttctgtgaggtgtggtgaaactgtatgacacttgatataatttggatatgagtgttgttgacagcatatatttggtgtgttaaaaatcattctctgtgatgatatgatgatagaactgtaaccttgtgatgttgtgatgaggctgggatgaggaccctgtgaagatgactctgtgatgttgagtgatgatgaaaataaaataataatttacaagagataaaatgaaccagttatgcattttcatgcgcatatacccagtggggtatgagatgatgatgatgagatgttaaatctcataaagaggagtgtcagataactaaactgagtccatataattagggggtagaaacagtgaggaccacaccaccatgatgatcacatggatgggagtgataatcctacgcgccactgagctaccttgaccggatggataagttcattccactaaggtgagggtggggttatctgacagtggccacaattatttagatgttgctgagatctcagtcatgcatcatataataaagatgagcatgcattttctatgtgttgtgaatagaaaagaaatgatttaacttatgtgaaaaaaaagatataataactgttataataagtattctgtattttatttagttagtacgtaaatttaatatttctgtatttaatattttgcggatatttaaattttgtttatcatgacttaccctattttgtgtcttgtggttgacacctgtaatgacccaattatttgggcgagcagaggaacagtgaaatggatgtggtacaagaaggtttggtgaagactgttgtgatgattctctgttttcatgttctctgttgtgttctgtataatggactgtatggactgtttggactgtttaagcatcaaactataaattgataataagggtttgtatggcaagtatgtgtgaatgacttaaactacgttatttagatgacgcgttaacgtttatgttgttaaatcattttcaaaattaacgagaaaattatttgaaccttcattcttcctgtttttcgaaaaagaaaaaaaaaaccgtaattttgtaaaataaatacgaaataaagcaaagtagaagcagtcatttcagataagttcatatttcctgctgatttcattgtgttagatatggaaggggagagtgagattcctctacttttaggaaggtctttcctagccactgctagggctttgatagatgttgagcaaggcaaattagagctaagattagataatgagtctgtggtttttagtgtatttgatgcgatgaaacatcctaatgatgaacatgactattttcggttagatgtattggatactgtgatttgtgcaggttttgaagcaagtgttgcagcagctgaggaggaacatacagaacaatatgcaaccagcactacacatgaggaacatacagaaaaatcaacaacagcagaccaaagacagcagcagaattttgtgacagcagctgtatgtaatgcagaaaaatctgcagcagaaaatgtttatgaagcacaagcagcagttgaagaaaatgatgaaaaatccagccctgatgatgcaaaggaaccaaagatggaagagctggaagtaaaggaagatgatattccttccggtgcaccaaaagttgagctgaaagaattactggaacacttgaagtatgtcttccttggtgataatgagacatatccagtcatcatcaacagagggctggaatggtttgaagaggaaaagctgatcaaagtactcaaggatcatagatcggccattggttggtctatttcagacctcaaaggtataaatccatccttttgtactcataagattttaatggaaactgatgttaagcctgtgagacaacctcaaagaaggctaaatcctacaatgaaagaggtggtgagaaaggaagtggttaagcttttggacgcaggtatgatttatccgatttccgacacaccttgggtaagtccggttcaaacagttccaaagaagggaggtatgactgtcatacaaaacgataagaatgaattaatccccacaagaaccattaccggctggaggatgtgcgtagattaccggaggcttaacgatgcaactcgtaaagatcacttcctacttccgtttatggaccaaatgctggagagactcgccggtcaagattattattgttttcttgacggatattctgggtataaccaaatcccagttgctccggaagatcaagaaaagaccgctttcacttgtcatttacctcttgaacttgaatataaagcaatgtgggcaactaagtttttaaattttgaactaaccaaagctaatgaaaaacggttgcttcagttgaatgaattagatgagttcaggttgaccgcttatgagaatgctcgtatttacaaagagaaaacgaaaaagtggcatgacaaccacatcaaacctaaggagtttattccaggccaacaagtactgctttataactcccgcctgaaactttttctgggtaaattgaaatcaagatggtctggaccatttttggtaagagaagtttttccttatggcacagtagcaatttcagccttggacaatgataaagcatttaaggtaaatggttataggctgaaacattactttggaggtaaggtggacagaaattcaagttttgtaccactcaaagctaatgatgaataaaactgcaataagtgtctagcttaagacattaaaataaagcaccatgttatgtatatattccctaatttaagttttaattgagttggtagcagtaagttcaaacaattttgcatttatacatttatttatttattttagttcatgcattattacttaggttttgttgaattttaaataagtagtatcgtttagtattggttttatcaagaattagtaaagtagtttagttgttaggttaagaaaattgagagcaggaagtagtaatgagaaaatctgtcaggggttgtggcactactcgcgccacatttcgcgctaacagcgccacacatactgcctctccacgctaatcgcgtgaaaaccgcgctactggcatcgtctgctctaaaatcatttaatatctgcacgatttcaagctaatagcgtgaataccacgctaccagcttcacataacagttttcattgcacgatcccacgataatagcgtggataccatgctacttgcgccaaatggcagcacccaaaagcactattccacgctgtcagcgcgaaaaatgacgctaaccgcgtcatacatggaatttcagcagaccttccagggcaagccacactaatagcgtgaatatagcgctagtcgcgctatggtacagagagaaattgaagctgaaacgaccactcacgcaaatagcgtgagatccgcgctactcgcgcgatataccagaaaccaattaggctggcactggagcatggcgctggttgcgccatttatcgcgctacccacgcgagttcgcgaacactgttttttaatttaaatccccaaatcgcgtatttcatccccactctcacaaatcctcgccgtctctctcgccctaacttcctcaaacttcctcaattttcctcaacctccataacttcctctcattctcacacactctttaaaagcccacattgcctcctatctcacactccctgcattttctgttcgcatctcaacatttgcatttccactacattcatcacttcagagtgttctatggcaagagataaggtatttgtttaaacttcaaattgctttttattgaataatggcgccctgaggaacattagaaacacaatgcttagtgctcaagttctcacattccaattttggacaacacctttgagaaccttaggtttagccacattttaagctttcctaaatataattgctcatttctgctatctcattgtctgtgttctgatctattttgaaaatgtgggatgatgatggttcccaatagatatataaggttgatttaaattcttgcacattacatgtttgataaaatgcctgaatgagaatttgaatgaaattggcaccaaaatggactcaataggtataaactttggattaactaaaatgctatgatgtgaataccattgattactcttagacatgatagaaacataatgcattaggcttgccatattgattgaatgcacactttgaattataggtagcctaattccatggttcaaagataatgacagaacaatatgattatagtgcactaaccatagctataacaattgaatgaattgtttttggtgctttaacctccaagtgaaactagtgttattgttttgtatagtatcaataaaggttgctttgaatttcttaaaatatgacttgagttgtgtccatatttctgtgtcttgactttggaaggcgctcttaaatgcaaaaacattgaaccattgttgattgaaaataataagatgatgaaaattttggtgttcatgttaatcaagacatataagagtctaataagtttgatctggatgttattgcaatgttttgagtgtaatgcgggaatccaaaggcctaaatctgggaatggtggacataggatttagtctttagtatagaaatacttaaatttcagaatacatctatagatgagaactttgaaaggaaagcatgagatactgatatagttttgttgcatgacatgatcaaagttctatgtcttcggctattgagtgctacatgaataactccaaagattgaacatagaaatgaattgtgctctctgatttaaatcttgttaaaaatttgagatgtgaaccttaggaaatctatagatatatgtatacagttttgatgtggtgtgaaacatgcattgaaagtaactctgaatcaacttcattgaaccataaccaacatctaaatctgggaattataaccacattgaagtgaatggtgttgttgatgtccatatgactagaccctgttgattctaaatatgctattttggtcaattgtgatatgctttgattgctaataagattaccaagggtataaaatatgggaacctgtgtctatcatgattagcaccacaggatttaaaattttgaattgttattacatatgaagagaatgaatctgggaatagaaaaattataccttgcttgtaattatactggggatataccctatttacattaaggtacatggatatattggttctagaacctggatgacttgattagtgctgaaactgaactgccattactctcttaaaaatgattctgcactgtgataatttccttgtgcttgttgatttactcccattaaggaaataaatctgggaatcaccaatgttgcttaatatatatatgtttgaaattttctgattttcagggtaaacagattgagaaagccaaacaagtggttaaaggaaagaagaaaaccactggagaaagtagcaagaagcgggccagaatttcagattttgacgaactccgcttccgcaccgctgaatgccaggaaaagtttgattcctggtatcttccaaagaaaatcattaaggagcggaaaattatgtgggaaaccttcccagaggacaacccaattcgacaagtcatcatccgaagacagtggcagagacttgtgactttcccggagcaaagctccagcatgatcctgaaagaattcttggcgaatgtggatcatgacacagtctgccgcaccaagtgctcttgggtgaggggagtcacagttccatttggtgagaggaccattgagagcttgctggacaccgactatgatccttactcggcatgcaacttcagaagactctttatgcatatgcagccggacgcagtgacaaagatgtataacgacgatgtcccggagttggccactaccattcgccatgctatcaccggtttatacacggcttggaagtccaagcccgacctcgattacataccggaaaagctgaagaagtccgagttagtaggagatgcaactttctggcatcagtttgtgaaccacacggttattccttctactaacatgaccgatgtgaacgtagagagagctattcttttatatattctacgaggggcaggtaatcttctgatctcttctatcctatctaataggattttgcatatgacccaggacgccagtagtaagtcctggataggtcactcctcccttattcttcttctctgccggcacgcgggggtccacattgacgaggacgagcccatggacgttccgatcgcaccactcatggtctataagacctaccttgacgccatggagaccgcagcggacgagcaggtgattagagcttctaagctcaaacctgaggagatcgcagctgcttcacctcgggaattaccaattattgatgacccccagcccgaccagcagcaccaccatcatcatcgatgccaccgccatctacagtctctacgcgcactccactatacgaggactcaccaagcgtacttgctttccagtagtttgtgaggactcggctggtgtttcagagcacacagctggagcttcagacaagcatgtggggagcagtatgccgacagttgggcattcatccatcagagtaccaggctccacctccaccacggacaccagcaggtcctgtagctaccgaccccatcgatcaggcttcggatgcagacacagcaatcacccagcctttgatttctgagcacacaaaggttgttgtgactgcagaggaccgagatgcagcagattgatcaggattatttttatgttttactgttattttctagttcagatttatatcttgttgttattttagattatgcattttatattctgcacatttacatttacattacatacacttttatagttctgcattgatatatagtacagtttatcgtttatcatttttaatctgtttcgaccaatgtggattgaatgtgattttccgaataatgcttaaaaatgtccaaagagctgtgaccatgtttgtggttgctggggacagcaacatataaatctgggaatggttacgcattatttcgcaaatcacaatcaagaaacaaatgaagtctaacagaactctttcaaatttttttaataaccagaatttttcttaaaaataagcagcacacaaaaaattttcagattaaaagtaaatgaacttagtgatggataggattcatggatgaagcttgatgaaataaaatagaacatggactgcataatgcatgactggaatttgattgttggtatgtaaaatgaatgttgaagctaaattgacgcttgaaatgcagtcagatgagaagaatttgagtcataacacctgcaaggtttgagccaaacacggtaaattctttccgagagactctgatttcattgtactctagaatttgaattgtttctatggatgcaggtatgacttgaaatgattaaggcatgtttttcttctttaaactagggccaaattgactaaccttttaagtaatttccaattgcaccttatttgagcctaaaagcctttcatttcaaaataacccaaatcaaaagctacatcaaaatgaccaaatccttggggccagaaagggttgatttaagtctatgacagtggaaacacaaggaattgttcatcaagtatcaagaagcacaagtaaatccaatgttggtgaaaaacaagaatgaataagcatgaaccgaattagaggtcaaagaatccatcagaaaaattgtgaagctgcagtaatttttcattatatatgttttgtttatttttttaaaaaaaaaactttagtattattcagttttaatagaataaatgttgaataaagtaccaggttatgaaaaagcaggcgagaagcatgttatggacttaaaagactggatctggtctcttattgagctactatccaaaaatttatcctacctttagttcagccacgttacaagccgaaaagaccttttgatcaagtcataattgcaactgttgagaatatcttcaagcttatggtagtgctgtgatgttgttgagtaagagggtaattatagccttaaacacttaagtgaatgagtgactaaatacaaatttgtgagaaaaactcaagttactctcattgttgatagcattgaaagtgccaagaatagctttgatttgaactgatcatacatagcatgattattctaggattgtaggctgaggtttgtgtttgattattgattcttgctaagttttgaattcttctgttgctggggacagcaactttcaaatctgggaattgtttgatgtgttgcaaacacatcttatttctagcttagttttaggttatattttaactaaatagttaggaaatagtttcaaaaattagttctttttagtatttttaattgttttaagcaattcaataccatttaagtatttacaggtcaaaaagaggaacttaagagaaaataaaagaagaatccagattctgaagagcgcgcggttcgcgccacacccgcgctagtagcgtcaagtccagaattgaagaacaatcattggaagacaccacgcgataagcgtggaaaccacgcgacacgcgtgggggacccgagagtatcacgctgacagcgccattaccacgcaagtcgcgccagaacttcaaggattaagggttttctcctctgccaaccagcgcgaatagcgtcataagtcacgttggtagcgacagaacttcaaagataaagcctggttctttctgccaagccacgcgggtagcgccatacatcacgcgaccagcgccattctttctgtcattccacgctactagcgcgagaacgcgcgcgggtcgcgggaggtcgtatttgtttcctattttaaaaagatatgtttcgaaattgggttaggtttttggcttagttactgtaattaaaaggttctatatatatgaggcctcaaaacagaataagggaccctttttacatccatagcatctagaaaatagagaaaacatccagaaattatcattgcaaaccctaggaatcaagattctgatccaaagttctgcacaacaatgtttcattcatgtgctttggtattcttgaagcctatggcaggctaagctcctgttgtgggaaggccatgaacttatgagttatcctctgaaatttgactggtattgaatgcatatgttttgtttattttacttcttttttgtgcttatactttatcttgtttagaattgatcactctagatgagtactgagaattataattcacaatggacacgttggggttgtaatatctgacttgttaagaataacacttgttcttcacctagacatagggatgcataagtgcggagtttctaatatgttctttgatttgcttaaattgattaatttcactaagacattaggttatgacttcagtttaaagggttgatttactaagaaattaggggttaactaatataggaaagatttattctccgagtaatcataacatgaacccatatgatttattctctaaatgtttagtttgacggaatcgctaaagggttagggttctcgatcgaattaaaaggtgaaatcgctagttatctaggatttacaaatataggagagatattttatatgtgaacttcaagattaacataatcattcaagtgaaagaggtaatgctcataagggattgtgcctgaccacaattattactcattggtaacttcctagtttaaatttactgctttgttttaattttcgtttttaatcaacacaatcattcaataactctttgcgtaatttctgttttctgttttcaatcacaattgtttatttttactgcaaaatcactccaatccctgtggagacgataactcacttacctactttattacttgtaaacggttggtgcacttgccgtattcattcgtataaatcgtaacacaacaattttcttctacatggttggtttggctcctgtgattttcttcttccatggcagtgtgttttgctgattggttttgatgggctaattgccatctcggtgttaaatgcttttgcaggcacgtgctgtatgaactgatgggcggaaaccaagattctatacgatgaatattgtggtttatgttgttcaggtgaaaattctattgtatataaagtttgtgtatgtgatcaactattgaatgatgtttgactttggttgtgattcaccatacggttgctagaaggaaaattttgtgtgatatccaataacaggtgaaaaaattgtgttgtattgttggatcttttaagtcaaactcagaagtatagactgattactgctttcaaacgtcaatacaacgacgtttttgaaatcttttttacaaatgaattattttcaattccaagatagttccttttgtgtcttgattactgctttcaatatttgggatctggtcttctctgaaatttcttacactagttgcacagtcctggttttgtgaggtggtaggatatatgattgtaaccagtatatctgtgaagaaggataataacaattgtggcctttgagagtcctaattttgaaatggcataattctttttgtcatatgatgtgttattatgatcttcaattttgaccaccaagccagttttagtgcatatcttggtaaacatggacgtttcatggacccattttacttttgtttaaatttttttaaaatttctctccatgactctattttaccatttactctcttggctgactctcatactagtgccatataatctgtgcaacaaacatgtattctacaaccaaagagaagataaaaacttatttatcctagagctaatttaatggcaatgccacacctatgaaaatgcatgcattccagaccaatgaactgaatattggcctctttacttttatcaaaacctttaaaataaaatggaagcaattagtgttccaaaaggattgttccaagggacagtagctgccttgaggccaacaaatttgtagcaaatcatttttgttgatgtcttattaagcaccgcagtcgaaagtaagtatttggagagctttacatttccaaattggtttgttgataaggaagaattgacttttgggcaaaaaggaatttacaagaaaacatgccagaagagtcaagaattcactttcctttcagacttatccaatgtacaaagcaaaatcaagttagaaacaattttcgtttgtgttattcttttttttggtcttcatttgaagtcaaattaatggaaatgatttcttttggctatcaattttggtaccataaagaatattccactatatagtgttaggtctcaagtatctcttgaagcaataataaaattactaaagtaactccactagtgagattctctggaataatttgtcatgtcatccattgaaaggaatcatattcaatggtgttcaaatatttgcatacccgctaacgacagaaaatgtagaatctagaattgaataatgataaaacctttaaatatgtaggaagtgattatagtgttaattgaaaaggagtgatttttttaaaccgtgtcatcatccttggtagtttgtaaagagtttgtcaaacactttttttcttttatgttaaatttgattattgttctgttaaattcctaaaaaatttatgtttcttgccatttatgaggtgggtgtattaatttgacttttctttcattaggctttttactatcctgtttaatactactctagttatttgttttgttatacttctgaagtttcctatgctatggttcatttcgaagctcttgaatgaatgaatcaattaaacaatagatggtgacaaacattgaattagaatgtatggaaaaaacattggttagattgtaactgaaaagtatgcctatgcagacaatgagcatgggacagctaaaccttgttgttggttttgaatactttccatattgattgcatgatattgagtggattttagatgttttggaaaccggtatgccatctagagacatttttaagctctttttcttatgcttggaagcagctcaatttgttagcaaattttatgttttaagcaattctagtgcagatttcatggatggagaagtttcttcaaaagggaactaatatcactgcccctgtgccgatggctcctcctggaactactggactcgggggttttgatgttcctttgtcaaaaggaagtactctgcgatctgatgctagtgctctaaatgttggtgtcctacatctagtacccactttagaggtgtttctattgttagcagacctaaaaatgtatgcatcatactcaacacactggccttctgttaacagtattgtatttctctattttttaacataaattatgtctctacaggtacgagcctaatactattgatctctcagatcacggtgaattagagtgagcacaatattttaaacaaattttaacttattgccaatcaaggctaccattgtctctagtgcttggcatttgtggctaatgcaaaatttgtatttgatgaaggtattggttcaagattttgtcagagcacttgccagatcttgtggacaaggtaactgttctgtcttgaaacacctagacttttatcattttttgtttagttcttctgttattctgccattctctaactcaacatttgagggtgaggttttgtttagatatagatataaatatttgtatattattattattattagtttatataaaaaacatttatctagatatagatatactgagcatatataaaaatatttatatattattgttatttattgtcttcccactacaggttgagaatactgagtttagaatgtcgagagataccatagatatttggctgttgggactgattaaaaaacatacaaattcacatacaaatgtgattacaaaatgatttttgaaaatttggtccaggtgcactgacaaatatatggttggtttctctttcctttttctctttcagattcggttatgttgcatatactacaaatatggcaattaggaaaattagtactagcaagcatatgtgaggtatgaatatataataaaggttaaaatatgtttcacatcttaaaattagtatactagtatattataagtatacaattaaaagtttgttcctcactctttgtccagattttgcaagaaatcccggtatgcaagaaacagctttgagtgcataagtgggacctatgtagttaccatgtgcatatctctcataggggttggtttttttggattcattctttttatggtatttgatgataggggaatttttgcttgcaggatagggataatataagataagaaagagagtatttatacatttcatgtttttcaaatatgttcttttctccccttaaaaaaacattcttttctaatttctccataaattggcatatataaattaattcaaattaataggagaaatttccattattatgaggaggtatagaattccaaactggcacgtagtgacttaacaatttaccattatgcaagtgatgtaagttggaatattatgacatggtttatctctaaaaagtatttgataaatttatagtgaatataattcatttttcctttaatgatgaataaatgtatcatgactacttcgtttgtattcacgtttaagttcttttatagtagcagtgttatatatataagttggtagctaccttttatgaatattttgttgaggattaggttatcttttaataaattaagctaaagaaaattagttattgggatttggcatataagcaactggacatatttcttcccttaaaaagattaattattaagcacttgtttggcatttaatttatgttccttatcttcatttagtcacttattagtttcttagtcaattttagtaaatgactatgctttatatatataccaactaccctgcaccaaaattgtcttcactgtaaatttaattaagcaaaattgaagaaaagagatgtcatgaagaggtgatcatgtgatgacccaaaatgaagtatactaattaaatgatatttgtttaggtaatgaaactaactcttctactttctaggcaaatgtatattatcttacaccttaagtcttagacattcttaagtgtatatgttattgcttactgaatttcagaatcattggcaaataggaaaagtttatatattaggcacttgtatattagatacacaattcactagcctttatgttgctcaattctatgtaatttttaatgtgtgtagcaaaataaaaaaacactaattcttatgctttgtcttttaggaatttataggcagtgcttttaggattcaattcagtttgttttttgaagctcttgctccaaatctagctttgcattaacaatgattattaaattggcaatttatagaacaacatagtaccatttagagaggtttacttagtaattttagcatttcttcccattgtactgaatatgaaagcttttgttctgaatcttgaatttggagttgtatgatgatacactttttggctgaattactttactgtcaatgtgatgtgacaccctcattaacatctcttgtcatcaatgtgatgtgtttgtgtagttcacacattctaggatgtctttttgaagtattaaacttagatgttttaattaagatttttgtaggcatgatcggtccaaggttgtagaaatattcatttggactgttttcaatttgcattgcacaaggtgatgtttcctcgtaagtagcgtaatgttgtgtgaatatgccttaaatttgtcttgaacctaattttctgcataatcctcttgtaatcaaaatttctgcttgatctctaatattaaagaatgcttaatttatgattggtgtattttgagacccatgactcttcttcagtttcagtttcttggaagttggacgttatcttgtttaaaagcactcatggttggtccttgatcttgtcatgctatgtttttcatattgtatctgtggctttgaggaatggacttgtatttgattctgtcttttatttcttatccaacatttctattataaggaaagaagttgcagacagaccttgaataataaataggagagatagtgtgaggcagtgggtgaaaatgaactcttcctttttctatcaaatctcacaactaaattatgcttcaagaatgacaccttttgaagaaaaaagtactagtaaaatgttaggagatccccactgttaatttcttagttggagaaaggaatgacaaaatataaataataggaggggggaagcaaagagcgagccttggatttttagagtggaatttgaagatatgggttattatatagatgatgatgatgatgcattatatagttccaaagtattgtattttatagtacattaataactcaaaagtgctggagtatatcttttattcatgataaaataattacatatatgaaacaagacaaattatattctgctttggaattttttctttattctttcccatattggtgatactggatgaagcatacattgagttttcagcaattgaatcaaggatgagttaggtgaagaaacatgagaatttgattattcttcggacatttagcaaaagacctggtatgcttatacttttatctttccctatgacacaagtaaagttcaatattaactgagaattcatgttgttcccttattataatttttgtttttttagaattgttcccttacaagatttggtcagactttattaaaactatgtttttgaggcatcttgtctacatgcaaatacatgcattttatttgagaattgacattattgtattgatatgtattttaatttatggtatgaaaaataatctctttacagttttaatttatacttaattattgtatgttgaactaaattttgcttcaagaatgacattttttgaagaatgacatctttatttatttattatttattaaaccataaaatttataacattgttttggttttaatgaagtaaatgctcctaactttatcactatatgtatcattataaggggtgtaatataaaaaaatctcaagtgcaccatttttttgtgatttttatccatttaaaaaaaataatataatacatacaaagacagttttgcctaaaaaccgtcttcgtatgtatttcttttttgtttttttaaaatagatacaaagacatttattaagcaaaactgtctttgaatgtatttttttgtttttttttttaaatagacacaaagacatttattaagcaaaaccgtctttgtatgttttattttttatttttaaaaaaaaaacgaagacggttattaagagaaaatcgtcatcgtatgttaacatacgatgacgatttttccttaataaccgtcttcgtaggtgtttaattaaaaaaatgaaaaaaaaattaaatacgaacaaagacgatttttcaggaaaaaccatctttgtatgtcgacatacgatgacggtttttccttaataaccgtcttcatttgtgtaaagtaaaaaaaatacaaaagaagatggttttgtagaaccgtcgtcaaaagtaccccattttcaacgacacacgcaacaacgacggttcaacaatcgtcgtcgtatggtctaaataaccctcgtcgtaggcctccgatgtagtagtgacatgaaaagtattgtttccatttattgtgtttttctttatactttctcaaggctattaacaagctgatttcttatggcaattgttgttattttgaccgtggagatcatgctgcagttgttcctttcatgtcaactcaagcatgaattaattagggctctaaactactccattgtggaagattggaggccatggcttctagaagaccaagttgcagggtaggaagcaaagtttagccttgatatgataaatgtttacttgttttacatgcaaaaccaagtagcatatcatgcattggaaatggaactttcctcatacacttgcatgtgtttgttcaagtgggaaaaacttggtccctttaagcatagagaagattccattgggtaagggactctttgggatacctaaaattgatctctactagtgtcttttttattcatagaaattgaatatggtactagagaatttataacactcacacaccctattcaatcaaatgagttagacctccttagtcgatctttactagtatatatagtatctggggggagggtattagaaggagatacaccttattcttattttctcgcactaaggattaataagaaatccaaatctttcaatcctaatttaccattgtttctttttagtgttttacttttcctaccaagaacaccctaagacatcatgcgtacaaatctttatgaataatgtgccttccatgcaggtacaaaaggacttactcgaatcaaatgacatttgcaattgtgaaggtaagaacattcaatttagatcacaggtgctctctttattcttttatttattttagaaagatacatggtgtggtgaaatagttgtcccttgtggagctatccaaatttgatatcattgtaattaattgcagggttcggtacatacagctcctgagtataagcctgatgaaggtttcgccatgttcactagatggatagctagtgagcctttgtaactcagtcgctatgatgatgtatggtataaaaatgttatgctcattaaatcatggcccctgtgatgtatggaataaaaacttgtgagaatatcgttttttatttttacgaaataaaggtttggtttaattgcagattttaccactcaatttttattattttgtaaactttatcatccaaatgtttttacgaattttactatctaaattttcaatttttgtacattttatcaccattgacggtcacaaaaaaaagttaaagaaaaaataaaacaacctcattttgttatctatgtgatgataaaatgtataaaaatagaaaacttaaatggtaaaatttgtaaaattcacgaaaagaaaattggtggtaaaatttacaaaaagattaaggtttaatgataaaaaaaggatgataaaattctcaaaatgataaaagttaagtgatagaatttacaatcaacccaaaaggttatctagatgcaaaagttcaatagaaaatgtaatagtaataataataaaagaaagattgaagctataagctggtgattgatgatgatcatctggtcacaagtttgaagttataataaagtaatgtaaacttacattttttttaatatttaaaaaaaaaactataaatctatacaattgattcaagaatatatgttcttcatgaaacttaattttattataacttgttgctctagaaaaaggattaaaatatcttaatacaatagcaaattgtatttgtagtcataactcttagtttgggatctaaacaatagttaagctcctgatctgtatttgtaatcgatcagcatttgaaaccttatttaccccaagatttgatcactgcacaattgaataaatagtttcacaaattttgttaaataggtcaccaacgtaataaaaaatatttaaaatttaatggtgttctgtatatttccagaacacaagtgtacaacacaaatatgctgaataattactcttggatcagattctaactctgctacttcaagaatatcaatggagaatggatacctcgaagtagatgatcatagagaaatacaccaatggacatgaggtgtgtgctctgtgtaattcaaagagatagagtcagaatgtgtgtacctttttgactgtaatcaccatgtatttataggcaacatacctcacagttacttcacgtactgcttccaggaatatcggcctctactcccacatctcaactggctctgttgacttggtcgtggcccacgttcaatgaatcaattgaatgcacaattctaataactgggcctcataactaaacccaactattatttccataacagttgcccccagcccggttatcaagcaaccttggtagccgaggtgcaatatatcattagccgaagtgaaatatgtttcgagctcagctgttaaaccataatggtgatcgaatacatcatgatcttactgtccgggtatcccacaattttgttggccaggtataacgcacccttaatgtccgggcaccacgtaaccgtggtgaccgggtatgacgcaaccctggtgaccaggttgttctgtgttttgaacccggccatataacaaccataacgatcgaatcgcaggatgtcctcattccctcgccgaggtttcgatctacatcttccctaggttcgccatacaaataagacgacaggacaatgatccgggtagatactaatctgggtaggctcagagtctacctttaatgttaaaaaacgactcaaccccataactcctcataatgatatctgttactattcctgccattaatgcaataaagcacttgtcgtttcattcccttcaataatcattgtcgttattaggcttttcctatcctgcccccaataacgtgcagtattttactagcatacccttatgtcatttcggaaattgccagttgtcctctgaaccgtttcattttctttggcggttacttattttatctttatatttcaaatttctgcctaaaatatcgcttcacctacttacttcttttcctgtgctatctcattctttcatcctcttgcgatttctttgcattctctctgcaatctccccttcgttcgtcttttcccagttattgactacttcatccatcaggtattctctttatcttcttataccttctactttcttaaatcgtcttcttttactttactttctgaaatcatcttttgttctgacattctgagtattcagttttgaattcgaaagcatataaggttttaaaccagattttctccttcttcttcgttttcttcttttattcatcctttcttgttatcatgaaacttacccctgaagaagaggtgcatttacgaaaaacagtcacccccaaagttgggtggtggctgtttggtttgcctctttccgatgaggagatacagaaagacctcctacgtggccataccggaggttcttcctcttcaaagaaaccaaaggttttcgccacccaaaacatacctaaacagtcgctcccccctaaaccatctctccagagcctcagcgggtccgaacccgcaccaagtgctcttccgggtcttatgggccccaaccaccctgggcctaaccctcaattgccccgaaaccccccaaggagttcttctactgggcttcctccttggcctatcaatccgcctaccgaagtctccccgtcctcctcggatgaggtgattgaagtccaatatgatgcatgtatggactgtgtctcggaggctatgaattatattaatctcggttctgacgatattgccgagtcaatactgaggtcatgtcggcacaatcctgtgttcctcccttctaccaaaaaaccacagctgaggtcgtctacttggttagatgacgacgaggttccgacctcagcctcctctacacctagttttttgccttcaggtatgctttactaatctttctcatttttattcacgtatgtatatatggatcccatcttggaattgtagacgagtcactttctgccgagtctcaatcggatgttcctccggtcttggcttctaaatttccctgggtcacacacaaagttcttcgaaccttctctactcttgacctttcctctatagtagctaccccgatgggcagacaagatggattcgccatccaagctcctctctcgggcgagcctgtctgtgctcgcagggaaggaaatgaccccaactttttcttcttttaccaagacgtggttactaaactgggaattcggttccccttttcttcttttgagaccgaagtcctaactcatctccggatagccccctctcaacttcatcccaacagctaggggtttgtcaaaacctttgagatgttctgtgaagacctggggatcccttgcaccgtccctttattcttttactactatttcccccacaccgggcggacgggtaaggagtcgcctaaccgcaaaggatgggtatccctctggagtcaaaccaagcgtaaactcttcgccccctacactgactcctttaagggcttcaaggacaaatattttaaagttgttgctgaatccggacaacaaccgttttttctctccggccccgagtcatcctaagtggattgggccttccccctctactggtcgcaagatcattatagtcaagacacgtcatcttaccggtttgccaagaggaattgccggattccgatgcttcctcaattttcttgatctctgaatatatggatgctcatgagtcgcctaacgcggctgattaccttcgtggtctccgggccgacttgcatgtgcattgtaaaataattttcttctaagttattgctctgctatgtttattatagtcatgtataaccgcttgatcttccttgcagctaacgatatgggaccgcagccatcttctacctccaaccggcttcggatgcgaccgcccaccccaaatctgctgaggccaagcgcaaagggctgacttccaagaagcctcagactcggcccgcgccacccaagtcactaaagcgtccgcttccttcctaccggactgccttggaaggcttgaataagaaaaccaaggtggtgttgaaagcacccgcggccccccgggtcccgatctcggccattgccattacttccaggccgggttcgaccatggccatcccggcctccactacttcggtcgtggatcttactgtggtgacttccccaacaccaatcccttcctccatcaaccccggacgctctgaagctcgcactcttcctgggaatctttgggaaaagggggtgacggaggaactctttaaattgattaaagtcccttcccgtcttctcgaagcccgtcctcctgtggatgaggaacttgccgagctagtgcgtattgaggagaatgccctcaagtgcgcgtctttagttaaatcttttgctaccctgtgccgcaggtatatgcctttgatagagtgcttttagttcaatttttgtctatcattcttagcgtatttgacctcttttggaattttatttttccattctaattcagtttttagtctaggcaagtaagtgggcttaattgctaattgtagcgtattttcggatttttgctcacttaacgtatctgacttgtgcagggcctatagagtgctaccgatctccgaatggagcattctaggagtccttggaaagataacaaaaagatctacaagtttgatggaaatagcttgaggccaattctgtcatttggaggatcattttgagattcaaagttagcacctttgcacttgtaatttgggctgcgaatttgactttcatggttgtaaatagcaaataattagattgttgtgtttgtttatggcccattctatttttataacttagtcactatttatattagtgactttagtgaaacttggacaacactttacattcaataaaaacagtttttacttttctttcttttagtttttaggatcaaactcttgttctttattttctctcatttgttcttcattgttcttgatcttcttcattttcatcttgctatccttttattttactgcactcatttcatggggctttccatggtgatgatcatgggaggctaaatcatcaatcaatccaaggatccatctcaagcaagagaagaattggagttccggtttggtatttacaattttatttgaatgttcaccttcttcttcaatttctattatgttttcatgattatgactgcatttaggattgaaatcgagttaggattatggattcatgtcctaatttcaaatgataatcacaagattaattgaatgatatttcagttagggttatggtttcaattaagttaggagtagaatcgattgaactgcttctattgagattgaatgaatgttcatgttagaatcaatatatgggaatgatgatgattcgaatagcttgggttggtgaattggattgatgctttctaatctgttttactttagtccttgataatcttgttaattttgcattgttctttaattttagtttgtgttcttacatgtcttactttacacataccaactatttgacaaagtcccccccttattattaccaatgatttgaagctagaaccatattgatcgtggctctgagtcgacctaagttaggtctgtgctacagaattagcttagtaatattgtttttgatgcttcttgacaaagcaatatcagcctttgaaatgattcttctgtgtatatgctcttaagtatggggcaaatcttttgaataacttatgttgcaggtatgcggccttggttgaagaaaagaaaaagatttatgaggagcttctctccaccaaagttggccacgaaaaggctcaggagaaacttgttgcggaaagccggcaactccgggagaacttactctcggagaccaagaaactgaaagaagagctactcgcttcccagatcaccttcacttctttgtgaagtgatctgggctgggctcaaggctctcttgaagctgtcgagcaacgagtgtctcaactaacctcttcccttgacaccttgaagtccgcccacgacgagaaggtccgggcttatgaggcgcaaatagcctcaatggggaatacacttgctgccgctgccgaggaggccttcaacaacgccctggagcaaattaagtgcttaaacccgggtctggcactcgccactactgggatgcatttcatggcctatgttgaagatggccatttaattcctcccgctggagctgaagattcttctgtgccggcaagtgaggatcccgttcccgaggaagaggcaacctccactgttccagccgccaacgctccaactgacaaccagccaccttccacaaaggaatgaagggccgggatgccggtttaacttgtaacatttggattttaatatcttgggctgagcccagaacaccttttccctttaggatgtttatgttgggccttgagcccagaacatatttattccttaacgatactcttttattattcaatatccgagtttatattacccggttaattgattctttgcgcgcatatctttggctccaacgaccaaaaattatattcttatttatttctgagacttggattttcacaatgaaaaactcgctgaagggttatcctttataccgatttgatcagaaccggccagcgtatcattcaatgctctaaaacccgctcaaacaatttgttacgtatcaaattttaagagaaccatatgaatctttgtctaccgggatccatactcttcataaaacatatgtaatgatactgaaccacatgttttattcaaattaataccgtcgcattacaataagtttatggccctctttcaatgagaaccatatgttccgagatagcgaataatgtaacgcctccttttactctctcgtgttcgattgattttagatgaaatctcatttccactttgtattagaattattttagttataaatttcatgaaaaaatttctttcttcttgcttcgattttacaatttattcgtaacataaacgattctccctcaccacggtttatttataataagaatacagtccatcaatacagtccaaaatatagttcatcatacagtcccaaatacatgccaacacaaaatacaaccgatctaagtctagtacaactcatcaaaatatcttcatcatcttctcttcatagtcatccattgctttactgtttttctgctcgctcaattaaattgaggtcatcacaggtgtcaaccacagacgcaaaatagggtaagtttatgacaacatagtttaaataaaaacatatataaaagaatatatacatagatggttataatagcatttataaaataatatgcatgcatgattcacccacagattaaatcacaccatctacacagcacacagatatgcaacatactcatcaagtgatgcatgctcctcttctttatatgatgcatgattttctcaacatctcatcatcaaatggccatagtcaagatagcttaaaacctcacgaattggatcaatcagtcaggataggtccgtgttgcaataggactcacacccacactacatgtgatcatcatgggtaggtgatctccccacagccactatcccccagttcattcacccttgaacgttcgatctcaactctagctatctgacaaacaacttcacggactagcccccgccagacatatgcatatgaaaatgcatgaatgatttacttttatcacatattttcttattaatcattactcttcttcttaaatctcgtacacctcaaagctcaacatctttaaaaactcatggcatatgctttttaaacaacacgtaaagcttctttcaaccatcacataaagctttacacaacatctaagcatacaaccatagtttaacttcataaattcttcaaagataagtcatagaattcaactacttatttaatcatataattcttaaattatctttattacaaagcttcaataaaactcttggaatccataaataatcacaacacacttaacaacacaaggattccaacacttcacccatctttgtttctttgaactttcatcaatcatatggtaggcaactttgttcataatagaaaataagtaaaatgatatttaaacttagcataagtaatactcaagaattggcaaaacactttttaatacataagcgttactattttccaaaacaaccatcttcttaaatataattataatatctaaggtttaaactatttaaaatattcaccgattaagctatacttaaacataaatctttatgaaattcaatatgataacatgcttcaacatacttctagcaccatatacatgctcatggattcatagaatattttcaaccaaacatataacttttagtaaaatattccattagataactttgattcctctaatttccgatcacttctaactttcatccattaaattaagttcaagttatttatttaataatcatttgttaaactaaaaccaagttacttaatcaaacaaccattcaagtaactatcttgagctctatgagacaattcatcaaacatctagcatgcaaagcttagtttcttatgaaaacaagtaaagattctcacgtaattaatattcaaacttggcttatcataaacttccccataccttgcttgcttctcaaatttttgtatagcccttgctcctaggaccccttgctttcacgtgaaagactaaagatgtaggcctttgctttgctttttggtgtaaggtgaaatggaagtgttttggaataaatgttgcacgttattttcccttagggcagcccccaaaattccgattcctatcatccttttatagggtgattaagcttgattttggttacaaatatccttaaggtaatgatggctagctttctacttggtttctccttattggttagtcattcctcatcctccaagtggccaagttcaagagaattccacatccttctcccttccttctcatttgcacgtgtacctccttggcttggagagcaatccacgattgtttctttttttttacgttggaatggctagctttgctacaaaaatcttcctaagttatcattgctaacttttccactttgttgtatcttattggctagttattttgcatcctccaagtgtccttttcttgaaatttccacatctttcttcactcctcttcattctcacgtggattgctagtcttgcaagacacatttgcttctacaaaaatctcctaggtcattatgaccagtggcttagtcttgattggctatccatacaagtggccttttttcttgaattttcttaataattctccactcttcttgattgtgcacgtggagtggctgagtctttagaaaaaatcttcattaatttcgtagaataacttgccaaggaagatttttatgttttccttccattcttaagtttatcccaaaacccgttttattaaaatactcattctggatttgttaaccgttggatctctttaaaattttaagggtacattattatccaatatatctaagttttgaccgttggaatttttgaaataatacctagaactgtctacgtgtccaaaggagtcaatgaggaagttttcttcaaaaaatcttattaattcattattaccttactttacaattggaccaatggcacgtatcctagctttcccatcaaccaagtgtcccttatcttgataattttgcatcattctcatttcctttcaagttgcacgttggattctaggcttggggtgcaagtctcatttgctttttttgccttttaggttattagttagatagcttaatctcaattcttattggtccatcttgccttgaattattaaaattactaaactaacttattaggaaggtttatttctcctataattaagagaaaattctatagattgtatctctcctttttcctaggtttttcggatgcttgagttagcttagattgagctcttttccaaaatatctaccgaaattcttagaaattctaatttatgatttcttgtcatccactatgttaataatttattatctaaaggtatttcatccattttccaggtttccacaaagtttctaaagttatctagtcaattttgacctaaagggcattttgataatttcaccactcaccgtaggggtataatcgtcatttctaaaatgttcagggtatctctgtaattgtcaccctaagggtattctggtcaaaaacatccaagggtatttataaagtttcctcttcgaaatattttgctaaaattcctatgggtaatttggtcatttttgaaatgtccaggggtattttcgtcattttccctaaatccttttatactatctttaattaacattttacccaagtatttcgaacatacatcatcaattgactatagttcttaaaattttggggtgttacaaataatcgttctcggctcatactctcaaaaaagaaagaaaccacttaacacctacgaccgtattacattattcgtactggtgatctcaatgaaagagaaccatatgtactcgagaaatgaccaccgagttcatactcaataaaagagaaacccgccagattcaaaagaacggtgtgatctcaatgaaagagaaccatatgtacccgggagaataaccaccgagttcatactttcaataaaagagaaacccgccagattcaaaagaacggtgtgatctcaatgaaagagaaccatatgtacctgggagaataaccatcgagttcatactatcaataaaagagaaactcgccagattcaaaagaacggtgtgatctcaatgaaagagaaccatatgtacccggaagaataaccaccaagttcatactctcaataaaagagaaacccgccagattcaaaagaatggtgtgatctcaatgaaagagaaccatatgtacccgggagaataaccaccgagttcatactctcaataaaagagaaactcacaccattttgcgaaataataatgaacattttcgaaacatcaactataatatttcttaagcttgtctgcattccatgttcgtttaattgctttgccttctaaagtttccaacatgtaggctccttggccgagtttatgggttatccggtatggcccttcctagttggctgcaagtttcccatcccggacgttcttatttccgatattcgctctccgtaataccaactcggctaactcaaattgacgcgggaccaccttcttgttgtaagaaagtgctacctgtcgtttggccctaagattccgggcatgggcagcaacccgaaattcatccaccagtgttgattctaccgccaactattcattatttgattcttcatctccttgtagcacctgttcccatcgccactataacgacttcgtttctatttttattattttaaattaatacggaattcgtacttgattatcgacgttattacgaaaaattttcgttgaaatgaaaagacataaaatatcattctagtcggtttgctaaatcgcactaattttaacgtacttcatagacagagtcatttaattatagtaaatataacagtccataatacagtcatccatagtgaaatacagaccattaaaataaaacaccgattatccaaaatagcacagatctccaaaagcagcaacagcaagtgacatcatccggataacaactcaaaacacagcatataattcaacaagctccttcatcatttcactgttcttctgctcacccaaaattggggtcatcacaggtgtcaaaccacagacacaacttgggtaagtatttaataaacatgattagataattgacaggaaataaaataaatacataacaaactttaaaataaacaacaaacatacggaaacatcaatataatacttatagacaggtatatgatggatgatgcatgctttctttattaaatgatgcatgactgagatctcagataattttctcggggtaccaaaagcaacataggtccacccactctagtggatcctccctccactctgagggtttaaattccagagtttcacccactctagtgaaacttccctccactctgagggtaaaaaggtaccacagtagtttcacccactctagtgaaacttccctccactctgagggttaagtcaaatgcgaatgatgcgtgaattcattttatttgtcggttactcctttatgtctcaactttcataattttggcacttaattaatcttccatcagtattacatgtaagtgcccataatttcaaggagtcaatcttaacaacatataacacgcatcttaattatttattcacggctaaattaatagaaggaaccttagagatttattaccactcaacatacagcttacagccattttaacaacaaatattacatattttcgtacagacaacaggcagcatttaaacagacagcaaaataaattcgtacagacaacagacagcatttaaacagacagcaaataaatttatacagacaacaaataatagttagacagacagcacctaatttccaaaacagacagcaaacaacagcatggtttttcctagcagattttaattccagcaaccgcacatacagcaacaacaacttaactatacagccttattatgttttaaataacaaccaacattatttgcttacagtagcatctaaataaagttacagacagcaagctttatcatacagccaagaacaattattaaaccaaggaaataaaattacacagccaccacgaaaatacagcaatttaaaagtttaaaacgtatagttacactcaatcaagaatttatcgaataagtagctacaaccacttcaatagagaattaaccatcttaattaattagaataagctattttaattaacttgtttcattctaaactccctaattaatccaattgaaattccctaaatatattagttcatttaggctttttatcgaacacatggcatgctatctttgagtttcattatacctatctttaaccttaaaaattagagaggaaattatccaaatcaactacctaatctatgtttattaattactttcccataccttggccttctttgatgtttgaaattcagcaacttgcctttcaccttttctacactttcacgtgaccttggcttatagtatcaccttggttttggttgtttgctttaattgaaaaggatggttggttgttttgaagagtggccgtgcaattgcccttcatttttggtcccaccattccttttatacttggtttcaattgctttacttaaaatatcccacaaattcattattgcctaacttttttgttggttccttttgattggtctttgctttccaagtgtcccacacctagatttttctacttccttctccttgtttcttgttgaatccgtgcacatggctaggcttggtgccttgggtttgtacgtgagatatcttggctttttggaagatttttacttaaagccactttccacttggtccactaggatgtctccttgcttatccaccacccaagtgtcctatttccacaagtttctacaattttcctcatgatttatggaggtgcacggccaacctatagttttgagctattcaatttcaattaaacttgttttaagtagtctaaggcttgtttagttaatttaattatagttgaaagaattttaactcttaaatttatcattttgtatcttatatttgaataatctcatggtaaatttatttccatgatttataatccttaattcaatttgtcttaattgaaaataaagttctaattttttaattagatcttaaagtagcttaggttgtagtcatattttattatatggttatttcattttctttcaatagtttatctatttttctattggttcatgcggtttttaattaataaaagatttagactatgtattaaccaatctcattctaccatcatgaggagaaattttcctagattgtatctgtctttcttcggtattttaaccgcacctagattattttaaatttaatttttcttgaactatccttcaaaaattctaataattttatcttatggtttttctttatgattagcatcaataatttcttggctaaacttgttttatattttatcagactcctaggactttactagagcctagatgaccttttcgggactttaggatattttggtcatttgagcaaatgttcagggcattttagtcatttgtcctagggacctaaccgtcatttgtggaattattcaaggacattttggtcatttctaaaaatatccaagggcatttatgtcatttatctaaaaatgcatatttataagaaaatacacagatacagggaattatgagggtgttacagccacgactgttgtccgacttccactggtatcatggcctcgcacccataagtcatgcggaatggtgtttcgcctgttgatgtttggacggtggtccgaattccccagattgcatagtgtaactgctccacccaatcagatccggcttcatacatcctctttcgtaatgcttccattaggtatcaaggggtacgtcaaaatatcatcctcttttgtatcaactctagtattattctccctaggaatatgattaacttccacctcttcgaacctggctataatctccctcactcaatataagtactttgacaataaaggtcccttcacttgataacgaccatctatttgggccgccaacagctgtgaatctgtgaacaccttcacccttcgggcctcctgttcttttgcctgcatcaacccggcgattaacgcttcatactcggcctggttattcgacgtcgggaaaatgagctgtaatgagaactcggttgctaccccgtccggattctcaattataacccagaatcgctgccttttctattagatgaaccatcacatataatttccaccagttgtcggatcctaaaatatgaggagtgagctccatgacgaaatctgccaatgccttggatttgatggcgtgccgggcttcaaactttaaatcaaattcggataactgaactgcccaattaatcattcttcctgctaagtctggcttatgaagtatttgtcggattggttgattcgttcttataataatagtgtagctctgaaaatatggttgtaatttctttgcggccgtcatcagtgcaaacgccactttctctaacttctgatatcgtggctcaaaatcacgtaaagcccggcttacgagatacactggtttttggatgcatcgacctcccttaccaacacggcactaacagcctcctcccctactgataagtacacgaccaatacctctcctggttccgacttcaacaagatcggaggggatgccaaatcctttttcatcgcggcaaacgttgcttcgcactccggcttccattgtattacagcttgcttctttaacatcttgaaaaaaggaagggctttttctgccgacttcggcatgaaacgtgtcaacgcggctatccttcctgtcaattgttgtatctccttcttgctttttgggaactgcatatctaacacagcccgacatttatccgggttagcttttatccctctgtgggtcaacataaaccccaagaactttctagctcccactccataggtacatttcagaggatttaaatgaatattatattctctcaaccgcctaaacgtttctccaagatcttcaacatgttgaccgagttgtggttcgaacaccctgttcatcattctttgatacgtagcccctacattcttcaacccgaacggcattacattataacagtaattggccttgtcgccaataaatgtcgttttctcctgatcttcctggtgcatcgcgatttgattatacccgaaaaatgcatccatgaatgacaataccttgaactcgaaagaattatccactaactgatctatgttcggcatggggtatgcgtcctttgggcacattttgttcaggtctgtataatcagtgcacactctccacttcccgttcgctttacaaaccatcacgacatttgataaccaagtagtatactgaatttctcgtatgaacccggcctgtagcaattcctcaatatgagcccgcaatgcctgagttctttctggtcccaacttccacttcttctgttgtattggttttgaccccgggtacatagataatttatggcaacaaaattcaggatctattcccactatcgcggacgccttccatgcgaacacgtcctgatttttcttaaggcactaaataagcgcctccctttagccaacttccatcgttcgtccgatgttggtgatttggctagcttgatcacctatctggatacactccacctcttccacaagctccggcctccattcatctgatgcttctctcatatccagttcaaccatattcactggttgtacccggctattactatcatccctggcatcccgacttctgtccgaatcccaaaataatggtaatggtttgctttcactttctcggactgtatcataataacactgccgagaatccttctgatcaccgcatatggtcactacctgaccattaccacccacgaacttaagcttttgatgttttgtagacatcaaaatatcccatctgtggatagtcggccttcccaatatcatattgtattgagaggggaagtctgccactacaaaccttactctttccgacctgaacgcctcctttgtgcctattgtcaactgcaagtaaatggctcctttgacggttgtattcctgtcgttgaaactaattaacatggttatgcactatttcaaatcttccacgtccaaattcatctttttgaacgcgctccataaaattatgtcggccgaacttccattatctacgaacattttccaagctcggtaattacccaccgttccggtaataacgagtccgtccccgtgatccggcactactccctccatagtggaggttccttgtctccttctcggtctttgaacttcggcagcgctctgatcgataacacctccttcagatacttcttcctttgattgacggtgtcacctccaccccccatggctcccaagataacattgcattcgaacttgggttccgggaacgtatcatcctcttcccgtgacttatttcttccttcctcctttccatgctggacctcatctcccttgtgtttattctttcgtccttgagttttgatcacatattgtcttaatcctccttctcggacgaacttctcaattgcatctcataaatcccaacattggttcgtggtgtgctcgggtccgttgtgaaactcacagaatcgtgacttatccaacctagccttcttaaacataggacggggtcattccaccttcttcatatcagttaacactacctccttccaaatctgagaacgggagacattcaaaggagtgtacttctcatacttattctcatatctccctggcctgaacttcatgtcattattccgagttcgattcttggaatgccccttattttttggaggtgggctccttcttctaggactctgctccttttctcgtcctggagcgtttgctatctccatctgctccaactccaaatatttctttggccgagctcgaaatttcatcaacgactttactaggtctttataaatggacttagcgaatctagaagatccattcaacccggcagagattaagtacacatggactttctcctccaacccctgcacttgcaaagctgcttctttaaaccagtccagatagctctgcaacgtttccccgggtaactgctttatttttcccagggcgaattcggactttggatgtttcttgctggtcgcaaaattcaacaggaatctctgcccaaaatcctcgaagttccgaattgatctcggcgacagtgtatgaaaccaagtctgtgctggtcccgtcaacgtagtaacaaaaatccttgaaataatgggttagtcaatataataaccctaagtcatgacgcgaacggcgcaagcatcagagcgagtttggcgctctaataaccatggttgctgaaaagaggtcaaactttggagttttgctgtgagccacgcctggagcgtgggaagtgctccagaaagtgtggaacccacgcctggggcgtgggaagtggcccagaaatggaattttgtctgggaagccacgcttgaggcgtgggagcccacgctgggggcgtgggagtcgcgtcaggggcctataaaaggcccaaaccctcgaaaaccttggcattttcctcctttcttcttcctctccgtccaagacctccattagagcttgctccaagctttttagggccatatttgagagcttaaacactttattatggccttaaatcgtgagagaaaccgtagcgaagcttgaatccttcattctttttcataaaaacccctttgtgagcaaaatccctttccttagagaaacctcagaaaattgttgattggtgaagacccaaggcttggaaaggactccagagctcgaggaagctgtcctgcagccttcttggtcgccgctgaggtaagaaactcgagtttcttcaattgattttggatttgggggttttggtgaatagtgacccatctgtgatagagctagaattagctctgggtccagttgagagatgtatttagaatgatgagaggatgaaggattagctttcaatttgtgatttggacaactttggtgttggctctaggttatgcatgtgtgacttggactgagtcatttgactgagacatgcaagagccttagtgatgggcttattgtgcctgagaggccatggtaacggtgtcctgtgatgtgaaccgttcaagccctgagaaaccctgagttgttgggttacgtgagctgagaagctcaatgtggatggcttgtgttgagtctgtggggactctgaggccatgtttgatctgagatataccactgagggtctatggaaaggcttgttgagggatgagcttgaggaaccttaggttagataacctgagttgatataaaggactgaggttccttacttgaggcagttgatgtaacaccccaaaattttgaatcacaatcaaatattggggtaaaatgttaactagagacagtatagaaggatttaagagaaatgacgaaaatacccttggacattttagaaatgaccaaattgtccctaggcattttcgtaagatatcttaaggaggaaattttataaacactctgggatgcttgaaaaatgatcagaatacccttagggtgacaattacagagtttccctgaacatttttggaaatgacgattttacccctagagtgagaggcaaaattaccaaaatgcccctgggtcaaaactgaccaagatgactttagaaaattgtgggaacctgagtacgggaaagaatacctttagccaacacattattaacatgattggggtcagaaaaccctaaacaataatttctaggaattttggaaaatattttgaaaagagctcaatatacactacctcaggtatcagaaaacctcaagaaaataatgaatataatctatagaattttctcttaattatggaaggagtaggtttctgctgaggacagcaagaagaaaatttaccgccatttggctcaattccttacaagtgctgtgactcaagtcgttctcaatcgatggcatatctggcatcatttcaacatcaacatgagttccaaatactatcaatcaaattctactcatgcatcatgcagtccatgtctcttatttcatctacttaactcagagaaattcgtctattaatgagttcattcgttttcttaatctgaaaaaaaattttgtgtgctgcttatttttaattgtttgaaaaaaatctgattatatgaaaaattttcacaaattctgttagacttcttttgatccttgattgtgatttgcgaaataatgcgtaaccattcccagatttatatgttgctgtccccagcaaccacaaacttggtcatagcgctttggaaaaatttaagcattattcgtaaattcgcattcagtttttgatcgtcaaaacagattgataagaaaaatgataactataaactgtactatatatatatatatcatgcagtaaaatcaaagtgtaaatactaaatatgtctatgaaatgtaaatgtgcagaaaaataaaatgtatgtaaaatgcagaatactaaaaataacaactcaaaacataagtctaaaaataaagtcttgctcagtcatgaaggtctctggtctcagcagccaagtctgtatgctcggggactgaaggctggtccactgtggtgtctgcgtccgaggctagatcaagagggtctgtggctgaaggaatgggctgagaaggctgtggaggctgggtaggaattggagtctgatactctgatgggtcaatacccagatgctggcaaactgctctccacaagcgtgtctgtagagccagctgctcactctggaactggagttgggtcctaacataatgctggaaatccatgaagctctgggaatcctcgtataggggagtgcgtatgggtacagctggtggtggcatagaagtatgtggtgggggactgggtatggaagtttgtggtggtgaggtctgtggtggaggtgatggtgaagtccgtggcgtgggagataccggtggtgtaggtgctggttggtcctgcggatcaggctgggggtcatcatgaaagtctcaaggagaggcagctgcaatggcctcaggtgtgagcttagaagctctaaccacctgctcgtttgaagcagcgctcacagcagtagtatatgtcttcaaagtcatgagtggcgcaatcgggacatccatgtcctcatcctcatcgatatggaccccagcgtgccggcatagaagtaagatcagtgaagagtggccgagccaggaccgtgtaccaacatcctgtatcatctgtaaaatccgatcagataagactgaagaaatcatgaggttacctgcacctcggagaatatgtaagagaatggctcgctcaacattcacatcggtcaaattcctggagggcatgaccgtgtggttcacgaacaggtgccaaaaggctgcatcaccaaccagctcggacttctttaatttgtccggtatatagtccatgcttggcttcgtctgccaagctgagtacaagcaagtaatagctcggcgaatggtggtggctaagtccgggacatcatcgttatacatcttggtaaccgcatctggctgcatgtgccagaatagtctgatgaagtcacatgaggcgtatggatcgaagtcagtgtcgaatagggcctcgatggtcttctctccgaagggtacctgtactcccctcacccaagagactctggtgcggtaaactgtgtcctgatccacattggagaggaactccttgaggatcatgctgctgctgggctctggaaaggatacaagtctctgccaccggcgtctgactatgacctgtctgatgagatggtcctccggaaactcctcccacatgatcctccgctctctgatgatattcttgggtagataccaagaatcgaatttagcttggcactctgcagtgcggaagcggagctcatcaaaatcagctgctcttgctctctttttactgctgccttctcctgtaattttcttctttcctttggatggcttggtttggtcaacctgtttaccctgcaattcagaaaaaattttcaaacaatgagcatcagtttaatgaaatatgtatacggatacagggaacagtcttaatacataagcaatcacacttgggattcccagatttattctgttgataagatcaaagcaaggcatgttttaaaccagttctgtatcttagatggaaatttaatgcagaacaggttatcacaatcattccagttaaataattcgaagttcatgaactgggattcccagatttggtgtattgcatatatataagtgtatagcgattttaatgtgcatatgcaatccaataacaattcccagatttcgtacctttggtgttctttagctaagtaaatatgtatgattcatgaccaacaacttagtggatatagcctgtgtaaacagtgttaacctacaattcctatcagtgactaatccataatttgaacaatttcgcctcattcccagatttaggtgtttgctatgagacttaggttgatttgaacatgctatgtatttatatcttattcagtgcaatagaaaacccaacatataattttaaactatcgtatcaacattatggtttatatcatgttttagcatgaacattatatacttctaagtcatttccaggcattaacctattccatcatcattcatcaaaaaaaatatatatatctaggataatccatagcagttgttcactttgagtatctttttatcaagttttatgcaaactggactttgtagactcatgtgtcattttagttatcaacaatgttcattcttattccaaagcatccatatatcattccagtcttatttcaattcaattcatgtaaacattcacagcaattagttaagtatatgtgtggttcatgtgtgtatccaaacaatgaagctttactcgatgcattcattaacattgaagaccataccaagtaaattttagtgtaaatttgtttaaaaactcattcagcccttttatcgaacatatggtgggcagcaatttgtgtgaacattgtgcgtgcattgggtatatggccaaatcccaaaattttctagagcatttcagaccacagacaaaagaagaggtgagagtatatatatataattaaaattgtggctatcctaaggtgttcagaaagtgctactcaccttgtccttggccatggttcacttgaagttgatgaatgtagagaaaatgcacaagatatgcagagcgggattaatgcaaagatgtatggaggagaggaaacgtggggttttaaggtgtgaggttaccaagaggcagttatcgtgggttaatgggggttgagggagttcaggagaggttttaggagttaggcgaaagagacggagagaattgggagtgagggcgcgagtttgaggttttaatttaaaaactgtttccgcgacctcacgcgactcgcgccgattatcacgtatgtcgcgccatgttccagtaaggttcaagtgagtcgcgtgactttccacgcgactcgcgtgggatcgggcattttgtttctgtagtttcacgcgatccacttggtagttcacgtatgtcgcgtgaaatgacctgattgtcttttggatttctagctatggcgcgactcgcgtcatctaccacgtatgtcgcgtgggattgaccagtttggcactgccctctggcgcgactcacttgagtttcatgtgagtcgcgtgaatttatgcagacatttaatgctgttgattgcagatggcgcgagtcacttggtatttcacgcgactcgcgcgaatggacagaattaatagcgcgatatgcgtggttggtcacgcgagtcgtgtgactttgcattttctgttttactttatattttccttccactctctaaattcctcactaaactactcttaattggaagaatttaactaagattactaacttatttagacaaaattgaaatgaattgaagtaaaatatgatgcatgaatttaaattgcatgaattgaaatctaaaactatcagctgaacttaacttatatacaatttcaatgcttgtttaaagtccttaagctagacttttacgtcaattcattcagaattagtttgaagtggtatagagcttgagtttctatccacctcacctccaaaataatgtttcagcctatatccatttaccttaaacactttatcaccatctagagctgaaattgctattgtaccatagggaaagacttctcttaccagaaatggtccagaccatcgtgattttagtttacccggaaaaagcttcagtcgggagttgtataacaacacttgttggcctggaatgaattccttgtgcctaatgtggttgtcatgccacttcttagtcttttccttgtagatgcgagcattctcataagctctcaacctgaactcatctaattcatttagttgtaacagtctcttttcattagatttggttagttcaaagttcaaaaattttgttgcccacaaggctttgtgttcaagttctagaggtagatgacaagacttaccatagagcaattgaaatggagacataccaattggagttttgaatgcagttctatacgcccacaatgcatcatccaatttcttggaccaatcttttcttgatgttccaactgttttctctaaaattcgcttcagctcacggttggatatctcaacttggccactggtttgaggatggtatggtgtggctaccttgtgttttactccatacttggctaacaagctctcaaggtgcttgttacagaaatgtgttcctccgtcgcttattatggctcttggtacaccaaatcttgtgaaaatgtattttctcagaaaatttataactaccttggcatcattggttgttaatgcagtagcttcaacccatttagagacatagtctacagctactagaatatattgattgccaaatgatttagggaatggtcccatgaagtcgatgccccatacatcaaataattccacttcttgaatgttgttcaagggcatttcatctcttctcgaaatgtttccagttctttggcaattgtcacattgttgtacgaagtcctttgcatccttgaatatagttggccaatagtagccacactgtaggatcttttgtgctgtccggttaacaccgaaatgtcctccgtagtttgatgaatggcagtgccaaaggatgtccggcacttcactttcaggtacacacctacggataatattgtcagcacaattaaagtataaataaggattgtcccaatgatacctattagaatcactcagaaacttcttcttttgctgccaagtgaatttttcaggaatgattttagcagccttatagtttgccatttcagcaaaccatggggtgactccaacagcaaatatgtgctcatccggaaaggcttcatttatttccagctctggtccatcttgcagtttgttatgttgaatgcgggatagatgatctgcaactttgttctccactcccgctttatctctaatctccaaatcaaattcctgcaaaagtagcatccatcgcaataaccgaggttttgcatcttgtttatgcagtaagaatttcagggcagcatggtcagtgtaaatgattactttagatcctaccaaataagacctaaacttatctaaagcatatactacagctagcatttctttctcagtagttgcatagttaatttgtgcctcattaagaactttactagcataataaataacatgcaactttttctcttttctttgtcctaggactgcacctactgcataatcgcttgcatcacacatcaatttaaagggtaaaccccaatccggagctgttataacaggtgcagtagttagcttttgtttcaaatcattgaatgcattaagacatgcactatcaaatacaaattctgcatcttttttcagcagttgacttagtggttttgcaattttggaaaaatctttgatgaaccgccggtaaaaccctgcatgaccaagaaagctacgaataccgttaacattaacaggaggaggtagtttctcaataagtaaaagtttagctctatccacctctaatcccatttcagatattttatgaccaagtactataccttctctaaccataaaatggcatttttcccagtttaaaactaagttagtttcttggcatctttttaacactttagctaaattagttagacatgtatcaaagcaaggtccaaaaacagaaaagtcatccataaatacctctagacctctttctaccatgtctgaaaaaatagacagcatgcacctttggaaagtggcgggtgcattgcacaacccgaatggcatccttctataggcgaagactccgaatggacatgtaaaggctgtcttctcttgatcttccggagctactggaatttggttatatccagaataaccatctaagaaaaagtaatagtcatgaccggctaagcgctccaacatttggtccatgaatggaagtggaaaatggtctttacgcgttgcgtcgttaagccttcggtaatcgacacacatcctccagccagtgattgttcttgatggaattaattcattcttttcgttttgaatcactgtcatcccacctttcttgggaacaacttggactggacttacccatggtgtgtcagagattggataaatcatacctgcatccaaaagcttaacaacctcctttcttaccacttctttcatgaccggattaagtcttctctgaggttgtcttacaggtttaacgtcagtatccattaaaatcttatgagtgcaaaaggaaggatttatacctttgaggtctgaaatagaccaaccaatagcggacttgtgttccttcagcactttgatcagtttgacttcctcatgccagtctagtcctttgttgatgattaccggataagtttcatgctctccaaggaagacgtacttcaaatgttctggtaattctttaagttcaaccttgggtgcaccagctaagatatcatcgtctttaatctccagctcttcaattttctgctctgctggtgttgtttctgcattgttggaatcagttactgcagctttttctcccaatgcatgtgctgtttccaattcatctcctgctgcagaattttctgcataaatttctgcagttgtagactccaatttctgcatctgtgtttgtgctaatgctggtgatttttctgcatgattaatatgtgttggactggttgcgtcttgtgacatatctccttcagaaattgctgcaacccttgacttaaaacctgcacaaatagcatcatccaagacatctatacgaaaacaatcatgctcatcgttagggtgtttcattgcatcaaacacactaaaaactacagattcattatctaatctcaattctaatttgtcttgttcaacatctatcaaggctctagccgtagctaagaatgatcttcctaaaagtaggggaatttcactttctccttccatgtcaagcacaataaaatctgcaggaaatataaatttgtctaccttaactagaacatcttctatcaccccagagggtgtccttaaggatctatctgctaattgtaaagacactctagttggtttcaattcagttatgcctaggaacttacacatagacaatggcattaaatttatgctagcccctaagtcacataaggctcttcctacatcaatatttccaatagcaacaggaatattaaaactccctggatctctcaatttgggagggagcttccgttggattattgcactgcactcctcagtcaatgctattgtttcacactcctttagcttctttttgttggagaggagttccttcatgaatttcgcatagttaggcatgttagctaatgcctcggcgaaaggaatgttgatgtgcaacttcttgaacatgtctaagaatcttagaaattgacgtttctgttcttgttgcttggtcaagataggatatgggggtttttcaaagcgtgaaaaatcccacttctttggtggctgcataggatctctctctgctgaattttctgcaactttctccttttctttctcagctgctgcagtatttttctccacctctggaacttttgattcgggcttctccggagttaccaataccttaccgcttctggttgtgatggctttagcatgttctcttgggttcacaaccgtatcacttggaaattgaccttgtggcctctcagccatttgttttgcaagttggccaatttggttttccaagttcctgattgaggcatcttgattggtccggtgagctctcgtttcagctatgaattcagtggtggtcttagtgagctgtatcacagctttttctaactcggacggttctttattcggaataggagggggctgcaagtagttgttggacttgtaatccaaaccacctccttgaaatcttctaggatagttgtttccggctgcataattgttgttcctctgatattgttgctgctggtatggttgttgttgctgccgttgatcgttccaaacgccatttacctgcacagggtcagcaccaactaaaataggacaagcattagactcatgctcaccttggcaatactcacatataacatatggttgacttgtgcccacttgtgctgcagaaaattgtaaacggtccattttctcacttaatttggccaattgctgtgctagaattttctgctccgcaagcattgcatcattggtattcagttgaatgggctccctctttggctgagttgtatgactttcgttctcagttctggccaaagacttgatcaactcatatgtttgagcggcggttttagatcttatagtaccaccggctgcaatatttaccatcattcttgtttcaggagtcataccattgaaaaagattctgacctgtttacctacaggcatgtcatattgagggcatctccttactagtgcttggaatctcttccatgcggtgcacagagtttctcttccactttgagtaaaattggtgatctcgttcaccaatctattgtatttgtccatagagaaatattctgcgaaaaatcttgaaactaagtcatcccatgttgctatactgtttgaggtttggcaattcaaccatctcaatgcattatctttcacagcaaatggaaataagctcagtctcacggcatcatcggaaactccctgatgtctaatagtgtcacagattctgaggaatctatctataaaatcatgagggtcttccgaatcatctcccccaaactgactgcgctccaccaatgatatcaatgaagggtttatatcgaaatggtttgcttggattggtggtctcacaatactagaatttggtcttgtgaacattggagccagaatatcctccataagttcatcttcaggccgtagtcttggtgggggctgattacgtggatcttcagccatctcttccgattcgaattcaggaagtgaatcgaaatcgaaaagttccgcttctcttcttttctgtctagctaacctctttcggagggttctttcaatttcagggtcgaattctaactcttcagggctagctgatcttcgcataaaaactcaagagaagtggttagtagcaagagttcaatcacaaaattcaaaaattactgaaaaattctgttaccaatccccggcaacggcgccaaaaacttgttgcgcgattacgcgaatgcgttttatacggcaagtgcaccgatcgtttaacaagtaataaaagagtaagtaaagtatcgtctccacagggattggaaagatttctcaataattataaaaattgtaattgaacgagaacagtagaatacgcaagagtttgttggatgattgtgttgaattaagtaaataaattaaacaaaacagtaaattaaattgaaaagatgaccaatgagaagtgattgtggtcaggcacaatcccttataagcgttacctccttcaatcgactgatgattttatcgttaagtttacataagacaagtctctcctaaattcgtcaatcctagactcttaagagcattaactagcgatttcaccctttaattcgatcgagaaccctaaccttctagcgattctgtcaaactaagaagtcaaagaacaaatcttatgggttcgtgttatgtttattcggagaataaatctttcctattttagctaatccctaatgccttagtgaattaaccctttgaactgatttcataacctaatgtcttagtgaaactagtcaattcaagaaatcaaagaacatattatacctccgcactcacgcatccctatgcctaggtgaagaacaagtgttaatcttaacaagtctgatattataaccccaacgtgtccattgcgaattataactctctatatctattcagagtgatcaattctaaataagattatgatgaagcacagaaaagaaataaaacaaacataacatatgcattaataccagtcaatttacagaggaaaactcataagttcatggcctttccacaacaaggagattagctagccataggtctcaagaacaccaaagcgattggatgaaacatgattctgtagaattggcttcaatcttgattcctagggtttgctgtccaagattcaatctatggaagtgtctaattgtatttctaagtctgctcctcgctgtcgtgcgtcattcccctaaaagctcagaaaacatccttatttatcgagtgttttaattacagtaacttttcctaagccttggtctattttccaaactatatctgtttaattcaggcaagaaatcagtgtcacgcgactcgcgcgcgacatcacgcgactcgcgtgacatggcagtgttgaatggcgcgatacgcgtgatatatgaagtggctcgcgtgactttccagagctgaattgcttattccttcaagtactcacgcgagtcgcgtgagtttccaagtaggtcgcgtggtacattctggacctccaagtgagtcgcgtgaggttggcgtgatgcgcgtgaggtggcagttcttgttttctcctttatttgctcttaatctctcttgttttggcctgcaaacacttgattggtattaaaatgctttataaaacataatatactaaatatatctaattattatactattttctaactttttattctaaatatgacttaaactaatgctatatttaggatgtgtttgcaacacatcagtttcctaaatgggttaatttaataattttattaattaggaacaaaatggaccaataagaattcaaataaagctattacatgaaattaagaaaaagaattggttgatggggaattctaaattaagtcttgaccatatgatgcaaaatcaatggaggaaaacttgtagaaaagttaagaatggtcatatggatagataaggagcctagctatttcattggtccaagtagaaagtataccattaaaattttaagaagatttttaaagaaaaactttctcttgactcttttggatacggaagaaattctatgcattatataaaaaatcccaacggtcaaaagctagacatttaagttaggaatatgcctttaaaattatatgaagatccaacggtgaaccaactcgggatgagtattttattaatacgatttttggagaaaaatcaataaaaaggaaattgctagacttcaagaacaattaagcccaaaggaaaaaagcaaaaactgattggtaatctataccatcaagccacggttaattggataaaatagcaagctaggatagtcattgagggggaggggaccacgtgaaggaaaacaacacaaaggaagaagctttggtcaacaacacatccaataggaagctaggcaaggaagactaagtcaagaaaggtgggacaagaggaataagcatttaatggaagggaatctcactcaaagagagcaagttacggttgaaacaagaatggaagaccttggcttcataaatgcaagcaaaccgtaggacccaaggagaaggaaaaagcaaatgaagaaaagtctactttactttgattggttgatattaatagttgaaaagtcctcctaagctttcattggctcttcaattgaccttagaattatccaaagatgtgaagaagcaaggcaaggcacggatgacccctaccacttggagcaaaaaaacgtgagcaaatttagaaggcaaaggaataaatgctttgtacttgcaaagcttggttggaaggaagtcattggctggtcaattaatgtagacccaagaggataagtttgcattattaaggatgacataagcatggatttatataagggaccgatggaattgaggaaagctacggatgctttcactcaaaataaagccttgtcattttagtaaaacattctcaccctttttcatcaaagtgaccgtgccactcaaagctttctttttctttcaaaaacctcactttcaaatccttttcaaactccatcacaaacaaaatttcaacaagccaattgtgggagatagctacgtggaggaagtgaaggaattcaaggccaaacataaattaacatcctagactaaggtgagggaagttttgatagattaaatttaagtatatgcaaaagttagtattatgatggtttaaaaaggtttaaagggaattgaggaattaagaggccttagaaaaataattaacaagaggattatgttagtgaccttagtaaaaagtaactaaatcaatttaaaacaatttacaagattctaaagaatagttgagaatttagtttatcttctataattattttgattattagcaatttatatgttgttatatttcataaattatgttgtttatatttcatgaattagtttgatatatattcattaaccaagtttatttggaattatgtctttaattttaacttatgttacctctgtatttaggttattgttaacagtggattgtggactatacaatttactcatttaatttggtgattagtaaaagattttaattgaattgagtaaaagacttctaatggaattgagtaataaagactatatggaatggtttggacttgataacaaccctgtaatatggtaaaactgtggtggtgactctgtgatgttggtgactctgtgatgttatgatgataaaactatgatgatatgatggtaaccctgtgatgttgtgataagactgtgacaatgaccctgtggtgttttgacaaactatgatgatgtgataatgatcctatgatgatgaccctgtaacgctaaaaagatgactctgtgatgttgaggatgtgatgaaaataaaataataatttataagatataaaatgaaccagtgatgcattttcatgtgcatatacccggtggggtacgagatgatgagatgttaaacctcatgaagagaggtgtcagataactaaactgagtctaggcgttcagctgtgttgttttctgaacttgggggtagttgagacagggaggaccacacctccatgatgatcacataggtggaggtgacattcctatgcgcccctgggctaccctgactgtctggataagttcgttccactaaggtgagagtggggttatctgacagtggccacaaattttaagatgttgctgagatctcagtcatgcatcatataataagataagcaggcattttcttacttgttgtgtatgggaaaggtatgattaatttttaataattgctataatatgttctttgtattttatctaactagtacgtatatttaatatttctgtatctaatatttttgtatatatttaaatttggtttatcatgacttaccctctgttgtgtcttgtggttgacacctgtgatgactccaaattatttgggcgagcagaggcacaatgaaatggacggtgttgtactagaagatgtagctgttgtgattctctgcttgtgatgatctatatttagttctgtaccatggactatttatatatggactgtggatttatagtggactgtatactatggacatgtgatatctatatctgtgtgaatgaacgttatggattatgttaggtaattacgcgtaaacctttatacgatttgaaaagctgttttaaaaacttaaccaattcaatttgaattttgttattattattattttcgaaaaaaaaattgaaaaataaaagcgaaataaaagcggttgtttcaattaccaataaaataaatacgaaatagaagcggtggttacaattgtggtatcagagccaaggtttgttttctgaggactgtatgcttgctatgtgtcatgttttgcatgtgtttactatgtgatgtatgtgtttgatgcatctctaagagctctgtgttttgtaggttgatctaagcagaatcatgaattaggttttcggtggtatgttttaaaggattaaagtcttaatccgcagttgagaaatttcttgaattaatttaattgaaattatttgaacaagcaatttgattttggtttaacgaatgcttggttaaataaataatttgaaataataagtagcctatatatatatgtgtgttatgactatctgattaaaaattatgagctgttttgttaaagtttagatgttgtacttgtttgtgttatgtgggaagcatgcttattctgtaaagattgatatttatgaatagcttaatcggtaaagattttaacaatttagaattataactatttaatagaatttgttactataatttgatgattggccgaaaattctaagtaatttgaagttaaaattaattggaaatataactattgagaaagtaagtataagttttagttcaaaacttttatgaaataaagttatctgtttaaaacgaattcaaagaggatcgagatggtttaaagtgtttaatgaaatgtttgtaaacaaaggtggttgagtgtttctataaaatcttatagaggtcatgtactgcttgaggatttgtggaacttgatgaattttgggtgttgtataaattataaagaactaagttgagctgtataataacttgatgttaagaaagttgttaattggaattacaatggataaatagaaagtgatttaaatgattttgataatcaataaaggtttttgtcatatttatggactctgggaatacatcagtggagaatatcatggtttaagtctttgaattttgaggatttagtagcaagggggtaagtgaaagaaaaattaagaggtatactaggattgaacttctgtgaaagcgtaaaggaattataattatttgaaagctaaaatcgtggatttttagattcttgacatgattttctgttgcttaaggatactctatggtcaagatgatcacgtttcactggaataaggtatggtgatctaatctcactagtaataaggagatgatttttaagtaagaataatagtgaaggtgggaattataagaatttgtagaaatggtttatgtggtttaatgatattaggaggttttgacatgataattgaatttagcagtaaaggaggaatggataaatggttaagtagtagagtaatttaattttgaggactaagtagtcaagtggtaagtgaaaagaaattaagagaaaatctaggattgaaatttttaaagtttaaaggaaatacttgaagataaattgtggattagctatgttactaacttggttttctgtgcttaaggtaattttatgatcaagttggacatgagtacacttggttgaggtatggtgatttaattttactggtaagatgttaaggtagaaaatattttccttaagatgatgagtattttacttatagattttggaaagtagatggtatgaataaatatatatttcatatgactgctataccataagttcttacgcgtatttataagttagcagactggccacctggataacttgtaaattgccaaagaatattatggcaggcagtcagaaaaataaataaatgactgaaaggattctaggtattgatctctataatgactaagtaagttggattatgagaaaagtatgagtttcctacataaggaatgataattaagagatggtattttgagtttggatgtgtagtaatttaggaaaattttaggatactcttgaagagatattttcttgaagaaattagagagtaaaagaattttaaggatcatgatcatggtggaataaatgactaagttgaaaagttagggaaaaaaaacttttcgagaaaatacggtacgtatgttaattcaattctgggtgtcttttgtgagtgataaccttgatgatttaagtatgttttgatatatgataggtgtgttgttaatacaagttgtttgacctattgttaacatgattgtctcttgataatttactcttaataataagtattgagttattttaagattggtaataaagaaatgcctatctttgcgaattaactttggaaagaaaagaatataagattttgtttaacctcaaagtgaagattaaggtactttagataatttatttgcctatagaaaatttctagaagtatctcctcataacttattcggtctattgtttggaagaatgatagtttttatatttgaagagatatatatatttaacctatgggatattaaagtttgagaaaccagtaagaaaatttttaggtacagaagaaaaagaaactattaatagaaaaaggtgacaaaagtgacagagagaaattagtatcatattgtgaatgaatttatttggagaaatactttaaggatgttagaaataagaaagttatagaattgagcaagggatttggagtatgattaagtttatggctaggtctgagtaattggtaaagtattcttataaaattagaatattgaggtactggtgttatttgatcattctaatttatttgtgagtggaaaaaaaattaaagtttttttgtgaaaccacaactaaggagtacgttttgatttctgatgagatagaatgagaaatatttgaggagttgattacagattttcaaggataagagaacttcatactcagttatttaagtttgagtttggactgtgaaccttaggacatatgatcttaagtctgtatttgaggatagaaattttctagaaaatctgtctaagttagcctttgatcaagctaagttgttgagaaagaattttatggatatccagtataagaatgggttttgatttaaacacttacagataaatcgtttgcaagaatgttgtgatgaatccaaaaaggagtttttatggaaaaataatagttcataggtaattgcaatccatgagagaaaatattttacacaaaccttagaattagcaataaataggatttcattgataaaacggaaccattatctgtgtgattcttattttgaggatcttagttgaaggatatggttcgaggaaatagagataaaataaaattgtggaaggattatcatgagaaggtccatatagtgatagtggatgtaagtggaaaactttgaaggatatctacattgataattaagtgatggatctgttaaaataatttaaggatcttaagataagatgtaagcatcagatctttttgaatcaaacaaatttcgaggacgaaattttttgaaggaggggagaattgtaacaccccaaaattttgaatcacaatcaaatattagggtaaaatgttaactagaaacagtatagaaggatttaagggaaatgacgaaaatacccttggacattttcgaaatgaccaaattgtccctaggcattttcgcaagatatcttaaggaggaaattttataaacactctgggatgcttgaaaaatgatcagaatacccttagggtgacaattacagagtttccctgaacatttttggaaatgacgattttacccctagagtgagaggcaaaattaccaaaatgcccctgggtcaaaactgaccaagatgactttagaaaattgtgggaacctgagtacgggaaagaatacctttagccaacacattattaacatgattggggtcagaaaaccctaaacaataatttctaggaattttggaaaatattttgaaaagagctcaatatacactacctcaggtatcagaaaacctcaagaaaataatgaatataatctatagaattttctcttaattatggaaggagtaggtttcctaaatgggttaatttaataattttattaattaggaacaaaatggaccaataagaatcaaataaagctattacatgaaattaagaaaaagaattggttgatggggaattctaaattaagtcttgaccatatgatgcaaaatcaatggaggaaaacttgtagaaaagttaagaatggtcatatggatagataaggagcctagctatttcattggtccaagtagaaagtataccattaaaattttaagaagatttttaaagaaaaattttctcttgactcttttggatacggaggaaattctatgcattatataaaaaatcccaacggtcaaaagctagacatttaagttaggaatatgcctttaaaattatatgaagatccaacggtgaaccaactcgggatgagtattttattaatacgatttttggagaaaaatcaataaaaaggaaattgctagacttcaagaacaattaagcccaaaggaaaaaagcaaaaactgattggtaatctataccatcaagccacggttaattggataaaatagcaagctaggatagtcattgagggggaggggaccacgtgaaggaaaacaacacaaaggaagaagctttggtcaacaacacatccaataggaagctaggcaaggaagactaagtcaagaaaggtgggacaagaggaataagcatttaatggaagggaatctcactcaaagagagcaagttatggttgaaacaagaatggaagaccttggcttcataaatgcaagcaaaccgtaggatccaaggagaaggaaaaagcaaatgaagaaaagtctactttactttgattggttgatattaatagttgaaaagtcctcctaagctttcattggctcttcaattgaccttagaattatccaaagatgtgaagaagcaaggcaaggcacggatgacccctaccacttggagcaaaaaaacgtgagcaaatttagaaggcaaaggaataaatgctttgtacttgcaaagcttggttggaaggaagtcattggctggtcaattaatgtagacccaagaggataagtttgcattattaaggatgacataagcatggatttatataagggaccgatggaattgaggaaagctacggatgctttcactcaaaataaagccttgtcattttagtaaaacattctcaccctttttcatcaaagtgaccgtgccactcaaagctttctttttctttcaaaaacctcactttcaaatccttttcaaactccatcacaaacaaaatttcaacaagccaattgtgggagatagctacgtggaggaagtgaaggaattcaaggccaaacataaattaacatcctagactaaggtgagggaagttttgatagattaaatttaagtatatgcaaaagttagtattatgatggtttaaaaaggtttaaagggaattgaggaattaagaggccttagaaaaataattaacaagaggattatgttagtgaccttagtaaaaagtaactaaatcaatttaaaacaatttacaagattctaaagaatagttgagaatttagtttatcttctataattattttgattattagcaatttatatgttgttatatttcataaattatgttgtttatatttcatgaattagtttgatatatattcattaaccaagtttatttggaattatgtctttaattttaacttatgttacctctgtatttaggttattgttaacagtggattgtggactatacaatttactcatttaatttggtgattagtaaaagattttaattgaattgagtaaaagacttctaatggaattgagtaataaagactatatggaatggtttggacttgataacaaccctgtaatatggtaaaactgtggtggtgactctgtgatgttggtgactctgtgatgttatgatgataaaactatgatgatatgatggtaaccctgtgatgttgtgataagactgtgacaatgaccctgtggtgttttgacaaactatgatgatgtgataatgatcctatgatgatgaccctgtaacgctaaaaagatgactctgtgatgttgaggatgtgatgaaaataaaataataatttataagatataaaatgaaccagtgatgcattttcatgtgcatatacccggtggggtacgagatgatgagatgttaaacctcatgaagagaggtgtcagataactaaactgagtctaggcgttcagctgtgttgttttctgaacttgggggtagttgagacagggaggaccacaccaccatgatgatcacataggtggaggtgacattcctatgcgcccctgggctaccctgactgtctggataagttcgttccactaaggtgagagtggggttatctgacagtggccacaaattttaagatgttgctgagatctcagtcatgcatcacataataagataagcaggcattttcttacttgttgtgtatgggaaaggtatgattaatttttaataattgctataatatgttctttgtattttatctaactagtacgtatatttaatatttctgtatctaatatttttgtatatatttaaatttggtttatcatgacttaccctctgttgtgtcttgtggttgacacctgtgatgactccaaattatttgggcgagcagaggcacaatgaaatggacggtgttgtactagaagatgtagctgttgtgattctctgcttgtgatgatctatatttagttctgtatcatggactatttatatatggactgtggatttatagtggactgtatactatggacatgtgatatctatatctgtgtgaatgaatgttatggattatgttaggtaattacgcgtaaacctttatacgatttgaaaagctgttttaaaaacttaaccaattcaatttgaattttgttattattattattttcggaaaaaaaattgaaaaataaaagcggttgtttcaattaccaataaaataaatacgaaatagaagtgatggttacagttgatgactgtctgatgagcttatgcatgattatatgttggaatggtctgtgatgtgtgtgtgttgtatgccttggtagggcttgacaccgtgggtgtcagaggagcagaccatcatttgaggctagagttgtgaggcacggctagccaggtaagctcattgttctggggttttccccttattctggtttgccacccgtatgggtgatgtatgatatatatatatatatatatatatatatatatatatatatgcatgtgttctgagcctgagaggctaatgaacggtgctttgagtaaatctcagaccgttctagatatttggaatatgtgatggcctagtgtgtgctgggctgtaatgatgaaccctaggatagacactgagacagtgtgagggtaatgagacacctgatatggcaggtgtgaggccgtgggcctttgagggaatgcagatcatgagatggtctgtgatggaacctagaggatactagatgagtatcaggctagttgaggttccctagtcagaggtagagtttgaggactccctggaatagctgagattccttgggatgtgccactgctctacaccaaagtcctaaggatagattgccctgtatggatgttcctccttaggcagtgatgttggaaagtcctggatgtgattgccctgtaaaggaggttcttgcccaggcatgtattatgaagtcctggacggctattcccaggcaagtgattatgaagtcctggacggctattcccaggcaagtgactatgaaagtcctggagggctattcccaggccagtgtttgtgaagtcttgagttgaggagctcctcaggcaatggttgtgtggttcagaggcggtgcctctcttgtgttgggaagtgtccaggggatgacacttatgatagatacctctgtgagatatctgtgagacaagctatgagagccaggatgagatattgatgccatggtgatggctttgatctctgatggatggctgtgagagccatgacgaggtggaatacctctgatgctgagagcatccagttatggatggctatgagagccataacgaggtggaatacctatgatacttagagcatccggttataacccagagagctgggatgtgtgaaagctaggatgctgtcctaagctttgtatgtgtgagctaggatgatttcctcagctatgcttatatgttttgttcatgcttggtggtaacccagggttagggaggaattccagaaccctgactttactgagacgtttgtctcaccctatgtggggtttgtggttttcaggtgcttcttgaggcgaagagcgacctcagggcaggaggccctagtggacttgataagttggatgggaggctgcagtagaagaccagagcagagtttcaagtgtgaagcttgtcttagatctctgtgtagttgtagggtatgtgtatacccatttatactgtacatatttgatatatgacccggtgtggtcttgtttttgagcatgtatatgtacagatgttgatgttgtatgaaagtatgtttcctcctgattatctctgtttagtttttggttatctgcctagttgttgtgtgtaggtttatctggatcagcaggggcttgttttatgtgctttgttatatggtttttatattccattcataatgtaatcaagataaacgattctatcgcttccgcaccacatgtttttaacgctgatagcatgatatggatatcattgatgataacataccggagacgtccggggtgttacagtcaatgccacggacgcacatctgcaaatcgaactcgtcaatgtgcacctgtgggtcctgggtcccatcatatttggacagaaatgacccatcgaaatcgtccaaataccgagcattcactatttcgtccacaaaagggctgttattctgctgaccctgattgtacttccttcgataaatcggtccctccttccttccatgagaaaccaactccacctctatgccgtgatttgttgatcgtcggtcaactcattgggcttctaggttctcgacccgattctgaacattttcatcattcctgacctcgtcccatgacatctcacgaactcggatccgctcacgatgtggaatttcacttctcatctgggcactggactgctcggcattccttggctggctcactggtgtcttcggatcttgccttgtcggtactaactcctcttcatggtccaacccgtcaacccgttccaccataatttgtaacctctgctccaactgtgccattcgttgattttcggcacgttttcactcttcattacgctcctccatttgatgagttatcatccgaatatcctcatgtctctgaaaagcttgtctcctttccatgctctcaatccggcttagagtcaaattgagagcgttgctgacaaaccgctcttccagctcttcctcctatatcctcctctgcactagaatttccctccgctactcggtcgagacaggtgaagaagccgcatcagaaactgcttccgtcacgtgcgcctcctcgcgctgcaccacatttcgattctcctgtaacaagatctccctgtttggcatctcggaatgtggtactgactgactgtttcttgtattcaccattgttgaattgtgggactcgaaatttatcgttccccacagacggcgccaatgttctgtatatttccagaacacaagtgtacagcacaaatatactgaataattactcttggatcagattctaactctgctacttcaagaatatcaatggagaatggatacctcgaagtagatgatcacagagaaatacaccaatggacgtgaggtgtgtgctctgtgtaattcaaagagatagagtcagaatgtatgtacctttttttactgtaatcaccatgtatttataggcaacatacctcacagttacttcacgtactgcttccgggaatatcggtctctactcccacatctcaactgcctctgttgacttgatcctggcccacgttcaatgaatcaattgaatgcacgattctaataactgggcctcataactaagcccaactatcatttccataacaaatggaaatatgattaccattaagtattttaaaccttgtaaaccttttttaatctaattggattataatatgaaatagatgcaaaacttcattagcaattaattaatcaacttgatccacacactactagaaatatatgattatctgtagattttcttggaaaaaattctgcaggaattatctgcaaattttttctgcacaaacatgtatgacacgattaattgttgaggattaaaattggtaggaaaattttcaagaaattttttttatttccaatagtttttctagcaaaaaaaaaaatatgcattaaatatttatcattattttaacattgtgaattttccttcaagagtttaaatccctagaaaaatccttgaatagaataaattttggaaactttttttgtccaacacctatgatccaaataaggtatgaattattttatctgtgcctcttgcgccataaatccttttgctccgaagacctaaaatctcttcgtgccatataaggttgattctgtgaaacttctcatcgattatctttcaaatattgttttactatgttatttatttgtgtttggaagcagagaaaacaactctatgatctggaaaatttcttgatgaacttcaatttgatttcgttactttacttcattgattcttcaaatggagtactatttcgttgttgtttctggaaattttgtgttgcttggttgagtttgataatgttcaattcagtttcagcaagatcgatgcagagaagaaaacatttgattgacaattgcaatttacgttgcacatttctcaattgttttgcagtattcagttcacgatgtaaactgagaaattttggcttgtaaaagattgttaggaagattcaatggaaggtcatgtagacctcctattgaaagtgatgttgatggtcacatgcaatgtcttcccgagacgtgtgagaacattatccgtggtatcccacacaaataccccaggagttatttcatgtgtttgaaacagtatggaaaaggttgttgagaggcaaaggaacgttggaaattaaatgccgattaaaacataattatgataattgatacatggtcccttatggcacatgcaaggagggaggaaatgggtgcatttacactacgacaagctcacgtggtctaggtccaagctcatgcgtgagactttcatatcttattagtcattttgaaagctcatatcataaaatgatatacaaacatatgagccaaaacctatcccaagcaatgtataacttcatgtttttgtgatatccttcaaactacaatacctttgttccaaagacctgaaatcaatcgacgacagtgatgcctcgacttgtgtatcaagcaacttgaatggtatccttattgttcaatcgacaatcaaaggggtgagaaatttttatcaatgggtcataaataccttattttattattttattatcgtttgagggtagtttttaaattttttactgaagaagagtaagtcataatagatattataatttttatttttttatttttaaattaaagtcgtaaatttttttacgactttttatgtaatttgttttataaaatgtgattttaaaatcataaattgaaatcataattatttacaactttatagcttcatttttctttatactttatttttaccattcgactttaagtatgtgtattatattttttttttatttgaaagtcattgtttattttatgactcatgtgcttcgtcttttctttcttggaagttggattgtcacgtactacttttgctgtgttttcttaagcttttgttttgttttttaaagctttttatttgttttgtttttttaactcttgctttctttttttaaaattgtttgttttgtaaattttcataaaaaatctaattttttaatttaaaaatttacaaattaatatatatttaactttttgtttgatttaatatttgtatatgtttttatttaatattttttataatttataatattatttgaaaaatgatatttttaaatgattttatttaatactattaagatattttggtaaaaaattatttttttactattaacttatgacacattaaataataattatatttagattttgttcattattttttcataattactgttgttgtctgctgcaattgtttcataacttataacgcatttttttatttgttcttctttttttgttttaattttttacacgcttttttcacttttttatattttttaaattttttcttaattcttttaatttaatttaatatttgaatatatttttgatatgtttttatttaatattttctactttttgttttaatttttttatttaaacttaatcttttttaattttaggtaatatttaaatagaatttaaaaagtaaaaaaatattaaaatatattaaataaaagcatataaaaaatatattctaatattaaatgaaattcaaaaatttcaaaaaaacaagttaaaaaatataaaaagttttaaaaatgaaaaaaaataaaataacattttataaaaatcaaaatataaaagtaaaaaaaataaaataaacataaaaataacaaatgaaggtcgaccattacggcttcaaagtcgtaatgatacaaattattttttaaacgttttatttttctcatttttaacttgttttcttaattttatttaatatttgattatatttttgatatttttttatttaatattattttatttaatatagtttctaaattttttatatatttttatttaatattttctaatatttttatttaaaggtaaaaatattttttaattttagataatatttaagtagaatattaaaaagtaaaaacaataaaaatatattaataaaataatatatttgaaattagatataccaaaaattaaaataattaaataaaaatatatcaaaaatttagaaactatattaaataaaaaatattaaataaaagcatataaaaaatatattcaaatattaaatgaaattaaaaaaaattaagaaaacaagttaaaaaatatataaaaaaagtttaaaaaaatgaaaaaaaaagtaaaaaaaagtaaaaaagtaaaaaaaaaagcaaaaaaataaaataaaataaacttaacaaaaaaaagaaggtcgtagagaccattacgactttgaagtcctaatggtataattaaaaatattatgaaagtattaaacaaaattaaaatttttttaattaaattaaaaatttatttataattttaaaaaattaaaaaacttaagaattaaaaaaaaacttaacggtgtataaaaaaaactatgaaaatatggaaatcttaaattaatttacgaattgaagaagtcaaagtcataaaaatatttacgatttcaaaatcatagatttttatgattttgtaaaaaaaattacgattttgaaattataaatcttttaaaaaaaatatattgaagtcgtaaaatattttacgacttcagtttcaaaaatttgaaaaaataaaagtcgtgaaaggggttataactttttacccaaaagtctttgggtaattaaaaattacccctaaatagtaattaagaaaaaaaaattacccttatgcgtaaaagcccccagtattaaatgcctgaaaaagaataaaattataaatcatttaaaagtaacaattaagagatgtaataaatataataagaatataaaaaatgtaaaaaaaaaaaaaaaactaaaattagatgacaggtgaaatgcgcaagtccacaacagtggtaagagaaccattccacacgctgcctagcagaggcgtggttatctcaagtggattctctcttttttagtagatgccgaacctgctgccccattgactccgaatttaatttgaatgggaagacaactatattgaacggttttcctgttcacacataatttatttctctctcttatattaaagtatcgttcactgattttattttttttacctacctgtgcggaacacatgaactgccttagtctctctctctctatatttaaaatctgttcggtcaccattttttattgatgtctagggatgtttacaattatgaatcatttgcgaactcgaattcacctaaactaatatggatatttggattaaaattgaattgatttgatcaaaatcgttcatgtacatattgagtcatggatttaggtctataaatccgattaaaatcgaactgaatcggtcaaaattgataaaaaaaaaattaaaattgtttgatttaattttaaatactattaatattgagatctaagtgttgaaactgcaaatgtttataatattaacggattatattttgttcatttgtttcagcaaatctggttgtaacaatctggttgcaccaaagtttattgcaagaaattagtttgtaagaaataattatgattcagactattatagtaaatatccttaaagaatattttgttttaatttgtattagtctattttagaatattatgttaatgacattaaatgaatcaattttactacttttaaacatttggtaatattgtgttagtgtaaatagtcatttcatatctgaatgtgtagatcactgacaaatttgtcctcgaaagatggaaattcaaaaagtaaaaaaagtgcaacaaattcattcatctgatatcattaatgaaatagcctatgtgatatagagggacgaaaatgtcacaaaaattattatcaacatggctgctgaataaattggatcaagttagtaaattttcattagaccaaaatgtcagtaagtttccattgtacaaaaatatcctatgatactattatgttccaacaatgtgtcaatgatttgagaagacaaacaaatagttgtagcaaatatgcaatgcatgtaaatgaatatactaaaatttgaatttccatctctcagaatgaatttgttagtgttttacacatttagggatgaaaatgactatttacactaaattgcattttatccttaaatgaaacgaaatttgggatctgacaaatttgtccaatggaaacttactgatgttttggtcaaatgaaaatttactaaaattttgatcaaatctattctgcagccatgttgacaatcatttttgtgtcattttcgtctctccacgtaagctctttcattaacggtaacagatggaagttaacggatgaatagattgtcacacttttttcactttcgaggactaaaatttgaatttttatcttttggggacgaatttgtcaagtctctacacattcagagacgaaaatgactatttatcctatggtgttaattatattgaatatttggatgaatcatgatataaaatagtaattctaaaaagaaaaaagatcaaatttaaatggataatctattggtccgaatcaaactaaactgatcaaatttgattggaattagatcctaaatttaaccaaaatcaatttgaatcaatatgccatcattcctatgataacgtgtttttttatggtgtgttgtagtttttttttcgttttcactttttcactttttctgtctgctggtttttacggttaactattttatattttccgttctaattgaaccaaaatatctgaaagattttgggcctctccaaaaagttaatacgtggaacacatggcgatttagcttatgatgtacattcaataatttaacctctagtcgacattgccagttcaattgatgatgctttttctttttcttcaataccgaaccgtccctactacaacatagcatcaatgacagtagacattttcaaaaaagtattgcctcctatttcaattataaaaaagaaactaattttgcacgcagacaggaagatctcagttgtgctggaccagacaagtactagagactttgtgggatcggggagggagtctcaatcgatcttttctaagataccttatcgcgccacgtacggaaatctttccatttccattaatagatacgacgactctccccttcaactcttaaaggttaggttactattgccactatatttattaaaaaaaattattaatttccttaaattatgttattcttatttgtttttaaattttatcattcaaatttgatattaaacattattatcctatttaataaaaactaattaaaaaataatatcataaaaataactgaaattaacttatatttatatcaatataatatatatatatatatatatatattaacatttgagactacaaagagtaaccatcaccatagagtatgttattttctttttgttttaggaattttaatatcaataattattttttcccaagaatattaatgattaatttttattggaagaaaaaaaattaaattcactgtctttctctctcctttttccttttactttttaagttaatcttacactctcttccaatactagtagtgtatgattaataggatgagttttataaacataattttcagcactgtgattttataaaattaaatctaaagtgaaataaatttatatttaagcattttatcttcaaaaaaaataacaaattctcactttaataaaaaaatacagtttttttttaaattcaacgtgttcttaacttgcctccaaattatactaacaagtaactagtcaactatcattcttatgcccaatatccccagttgggcacttctaaaactgcacaagaagaaacttcaaccccgggaatgagcacggtttctaagatgtgttgcaattttaacatcattcttctaattgctcttgcacttttagtacaaatatcatctcagcttggctccaaggtagaagtgcttcctggctttgaaggtcctcttccttttgaactggaaacagggtaagcattatgcaagcaacaccacttccacttttttggtttcaatgttattgaatcttcattatattaactttagagcaataacaggtatgttggattaggagaaaaagatgatgacatgcaactgttttactacttagttaagtcagaaaatgatcctcagaaagaccctcttatgctttggctaactggtggtcctggctgctcttcattttcaggtcttgcctttcaaataggtaattttttagatacaaactttctatcttaattcctataataacaataactagatttggcttgtattactattacccttctatttaaccaactaatttcaacctgtgtaaactcctatatagattgtattactcgatctgaatctgaattaccctatgacaccttactgtattactcaaaaagctgttttggaaaatagttttatcaaaaatatcttactgcaggctcataagaaaaatactgcctcctggactaaatttggtggactgaaatataattataaacaaatttaatgttcaacatcaacatcaacaacacctttaacccaagttaattggggtcggtggtaaatgaacccaataataaatcataaatgagacagaaagagaaaagaacagggaaagaaaaaagtgaaaataagacaaaagagagaaaaatgagtgaaaggaagaagggagaaaagaagaagaaaataactaaaacaagggaataattgaaacatagaactactaatgggtttaacactccaccaagcttatagtttttctccactctatcctaagacatacagtccgtcaatctacatcccactccattaggtcttgtttaactatctttccccaggtaagtttcggtcaacctctacctctttttgtgtcgagctcttggtaacaaacttttgttcttacgggagcatctagtggccgtctcataacgtgctcaaaccacctcaatttatgctccttcatcatttcacatactggtactactgatacctttcttcgaatatccttatttcttatcttatccatcttcgtatatccacacatccaccttaacatcctcatttctgctacccctattttatgttcatgttgcctatgtgatggctagcattccgctccatataacattgttggtcttacagctgttctatagaacttttctttcagcttaaggggaattttgctgtcacacaaaaaccccgatgcactcctccatttcatccaccctgctctaattctatgatttacatcttcatcaatttcaccacctttttgcaacatggatcccaagtatttaaaaacatctttcttgggtacttcttaaccaagtagatgcattgtgtcttgatcaccatcttttactctcgaaaacttacacttcatatactacgtcttgctcttgcttatcgtgaatcttttagactacaaagtgtttctccacaattccaattttctatttacaccatctttggtctcatcaataagcacaatatcatctgcaaaaagcatacaccacgtcacttcctcttgaatatctttcgttagttcattcatcactaaggcaatctataaacaaattaaatgttattatttcaaaaatacccttatgttcaaatctgattaaggttagtttaagaaatgtggtttttttttgtatgaaatcatgaaaattaaatgagcttaactagcattcttaattagtgtaaaattaggcatttttgcttatatttgaatctagagggagtactacttctgtacatttttacctggccactttggaagataaaatacaaattgagaaatgcaatttatatcctgatatgacttccaagtccactatcatttctttctcatttgtgaagtgttaaatatttaagaattaggataatggcataattgaaaagatagtaattagtaattaatattttgttgaactttaaaaccaaaagataaaatagaaactattttatacaatttatttcatgtaaattttctccttagtagtatctgatcaacccaacagaaaggttaaaataaaatttgtatctaaagagtacaaactagtttgaactgattcattccaaaatgcttaagcaccttgtcaacatatttgttgtgattgagatattgtcccaacacttctatttctgatgattactagtgtactataacattttgtgctacattgtgatcttttttcttaaattttccattcagctgaactttaccagcatgattatatcccatgagaaccttacctccatcgttttccaattgaatgcttaaccagttctcattgagaacatgagataggtaaatcttggatgatgaatccatttttgtttcaatgcctcacatgtgagctacatgcccccattttcataattctttccatcattgttgcatacatggtgtaacaccccatatgcattcggttcattaacattcatttatggtcattaagcgcaacaattaattaagactaatcaattcggaagtgataaacaaaatgacatcatcatacgtcatcaacaataacatcttcacactatgtatggtaattacatgcattatataattagaggaccaaaataagccatataacttagtaaaagtatctcaacaatggttgtacaaaataagggttcatatacctgtcctctcaacttacatcaatatctctcatatgtataacatacacactaactatgcaccttcccctcaggggtacaaatacaggcataacaaaataaatgagccaacatgctctcaaaatatatgactaaggttcacacagaaccatatcagagctcggcctcttgccctgggatccaccatccactcgttgagcatcatctgtaaaacataacttcatgcttccatccttcttcttcacgaagatcaccggtgctccccacgacgaaacagtcgatctaataaactgcttggacaacaagtcctccaactgcaccttcaactctcttaactctagaggagtcatacggtaaggtgctataaatatcggtcctacaccagaaaccaaatcaatggagaactcaatctctctcaggtagtagttgtgtaatctcttttggaaatacatccacgaactcgctcaacaccgggatctacgacagatcaacactcaacttatcttttatcacacatgagaaaatatagccctgagctccttctctaatagccttgtgagcttgcaagactaataggaaagagttggaacttgaactagctccatcagaaggtacaacaacctttttgttgcaatagtccaacatcacgccatacttgcccaaccaatccataccataatgatctcaagggtaggcatagctaggcagtacaaatcaatcgtgtactctctgccatcaaactgaaactgcacatctctgcagcatatttccactcgacagtgctccttagaagcggtggtaaccttcataggaggagaaagtctgaacctctgcaggttcagtcgtaatacagtacgatcctcaatgaaggagtgagtagctccagagtcaaacaagactcacacatcataagcatcgatcagaatagtacctctgatcaagccaggagctctggctgcttccctagcatccactgtataggtctgacctacggtgagtgctactgatatcactggagcagctatagctcgaccgcctgcctgcgaacattctctagcatagtggtcatgcttgccacatctataacatatcagtcgaccagtggggcacactcctcaatggctccttccacaagtagcacacttgggaggtggaactggtctctgtggcgctcttctctgactgggacccttcttgaacctgtctgttagagaatgaactctcaaatccctgcccttgcccttcctggcaaggcctggaccactgggtctcctcatctcctgtctctcggagggaataggctggttgtcactgcgcctactgatcacgtcctccacctggcgacattatcgcaccaggctgcccaaatctcgagatccactaccagcgatcttctcctcaatactatctctaagtcctctctgaaacttagcagcaagaacctctgcatcaagtaaagccctcctgaaatgtgcatacttagccaattcattgaacttggccaagtactcatccactgacatccgtccctggacaaggccctcaaactcgacttgcttctgctctctagcatctttggggaaatatctgtccaggaactgggcctcaaaagtctgccaggtgataacctcaccctggcctctcgacaactatgaagtggtgacccaccactcatgcgcatctccctgaagcagataggtagcgtagagaagcctctgatggtctgtgcattccatcactgtgaagatcttctctacagcctgcagccatctggcggtagcaacgagatcatatcccccatgaaaagctggagggtcatgcttacaaaaagcaatgagcatcttccctctagcagttgtatccttctcaacatctgcttgggacaaccggtcccctctgtggtggctaggcccatcagaacgatggctaccttcaccctggtggcgactaccctcaccctcataagcgtgagctggagaaggcgctctatcttctctcctcaaagatctcaactctgctattaactcctcgttggcctttgccaaggcctcattcacttgcctacttgcagccatctcatgctgcatagctgccaaggcggctattactgggtcagggtgtccaccggcgcctgctgcctcactgttgttttgggtcctcaccatggcactgcacatgtcacacacaaggtgagttgatcaggcccacatttagtgaccacacatgcaatagtcatagtgaacacctaaaacagttatgaataaaccacaatcaccatatataatgtttccctacgaaactgctctgataccataaaaatgtaacgtcctgtatgcatccagttcattaacattcatttatggtcgttaagcgcaacaattaattaagactaatcaatttggaagtgataaacaaaatgacgtcatcttacatcatcaacaataacatctttacattgtgtatggtaattacacgcatcatataatcagaggaccaaaataagccatataacttagtaaaagtatctcaacaatggctatacaaaataagggatcatataccctgtcctctcagaacttacttggacatctatggcacttccaaaggaagatcatccacttaagggtacatttccaaaggatgtccataagtaatctattctactggccagagaatctcatcaatcacacaacatatcatcacagtgtacatcatatacatgttctcaataaaagcaataacacacaatttcaatacgaatgcattatgacatacaataaccacactctctcagagtatggtggaacacaaacaaggggaaatactcccaagaacaagtgcttacctgctctctgtgctacaccggctctcccggcatcgtagccacaatcaccagcaatctctgtatcatgccctacataaaatcatattaacaatcaataacagttttcaaccgttagaatgaaaagaaacactattattttccatttaaacctttttttcctctatcttaaagttatatgaactaaccacctaatgggcaactcacagaccctcaataggatctatctcggcctaaccaaggcactagagtctccccaagactttgcataagccaattcaaagagctcaacactctattcaatccacatatcaacaattttcaaggtagctaaaacggttacttcaacacaattttactgtttatgtagtctcctaaacacatcttgtgaaggctctaatgttcatacataccataacatcattaattcagccaacattcttcctacacatacatttctcataacccaatttccaaagtccataaaagttctatttcaaggttaatccttcatcacaacaacctcctaagcatattttttcaaaggacctaagcctaatttcaactctaactcaaatgggtagctattcacctcaagaacaaattcttcaataatcggtaaaagttgtgtttcttacctctaaaacgacaaggaaggctagaggacaacttctccaagcttgaatgtccttaaaatgcctcctttcccctccaaaatcaaactttgtgaagttccctcgagaaaatgatctctctatttgagagttattaaggaaaatggaggttgaaatctagctcaatggaggatttccttcaactttcatgttggaagctaaagattttggtcaaggaatgaaggtttatgaagcttcccaagcttgttaatgaaagaaacgcagagaagaagaagagggttatgtttttggcccaaaatgagagagaaacatcatttttaagtgactcaactagcatcccgcgctgatcgcgccaaatcccagagaaaaatggctttctggcgcacttctggcgctaaccgcaccagattccagagaaaattggccttcttgtgaactctggcgctaatggcaccacttttggcgctactggtgccatcctggcgctaacggtgctgcatctagcaccattcgctctaggaactagccgtcgccaattctgtcgttaattacgtcgctaatgctttttgcaatagaatattgtaaatttaaaccctttttttgtcgtggttattatacatggtttagccttcctctaaaggtgtaatggactgagcaacactctatgatctaccacagtattttgatactaaaagaattgtttgaaagtttttgatccattcaattggttcagcttcaccacactattatgttttcaagtggtacataggagtcacatttttcactgccgataagttggggcaacacaaaatgcctcaaccagtgtttcttgcatagccaacatctcagccttggtgatctttccctccaacaacgtacaaatccccttatgtaacaccctcgtatgcatccgatgtattaacagctacttaatcagattagcgcagtaattaatttaaaatcaattaattaaaatgaatagaagcgttttcaaaaaacatgacgtcatcatcatttcctttcgaaaccatatgtctaattcattatgtatggtaagtatccacaatacatatacgaatgccaagacaccacaacaagcccctatgatccagataacataatggacgacaggtaaaacaataatatccatacagatatatcagaagaattataagccacatgtatctatatatatatatatgtgtgtgtgtgtgtgtgtgtgtgtgtgtataaaacaatcattgtggctatacaaaagaataggcaccttgtgtcatgatttcacagatcacatcctcacaagagcgtacaaaatatacagtgcctgtacatgacaatccatacaggatccaaaatagcacatcttccctcgcaggggtacaaaatacatcatatacataaagtagtgagccataatgctcttaaagtactgcccaagcagctatacaatgtctatccttattagagcctctcgccctgggacccatcatctctgccaaatgcatcacctgcaaaaataagattcccaacaagggtgagatacaatctcaataagctcagggttcttggaggttatcttcccactagctcacttccattataacataatatcaaagacatcacaacacaaggcctcctagccctcacaataacacatagacactctctagctctaatgtgtatctggggtactatgcccgccaaagatgcatcatcatcagcatcgggactctcagtccccagtgtgaggcccgaacacacccatgtcatcccatcgggagctacccctttacacatggatgcatgtatatggcaccttcgagaataggcttcaaccgtgacgggaccacctatctctggtcttaagggatcatacacactttatgtgagcaaattgactaggaattgcgatctactccttgggaggtccatatctatctaactggccagaagatctatctgaaaggcaaccatacacaaggcacagaaacatgtatacatattatcatgaggaaacctataacatccaattcaatgcatatgaaatcatgtatgcaaccattactccctcggagtatggtggaactcagaagggaaaaaccccaagaactagagctcacctggcaaatcagtgctctgctgtccaatccctgaactgtggtctctgccactaacaccctcggtgtcacatcctatataaaggcacacaagtaatcaataacggttttcaaccgttagaaaaatgaaaagaaacgttattctcttccattataaccccttattacactattttcaagtttaaggaccagtcgcctaattggtgactaacagacccctaacaggatctatcttggcttatccaaggcactacagtctctctaagactctgcataaaccaatctaaagagttcaatactctaaccatgccacattttaatgattatcaaggtggttaaaacggctacttcaacactttttcaccgtttatatagtctcctaaacacatcttgtgaaaataccaaggctcatacataccataatatcatcaatttaaccaacattcatcctacacatacgttcctcataacccaatttccaaagtccataaaagttctatttcaaggttaatccttcatcacaacaacctcgtaagcatacttttccaaagaacccaagcctaatttcagctctaactcaaatgggtcactattcatctcaagaacaaattctcaaataatcagtaaaacttgcgtttcttacctctaagtcatcaaggaaggctagaggacaacttctccaagcttgaacgtccttaaaacgcctcatttcctctcaaaattcaaactttgggaagttccttagagaacgcgatctctctgtttgatggttttcaatgaaaactgatgttgaaatctagctcattgagtagtttccttcaactttcatgttggaagtgaagtgttttggtcaaggaataaatgggtatgaagctttccaagcttgttaatgtggaaacaaagaaaggaagaagagaaggtgagttttatgaagaaaatgagagaaatgggtcacttaagtgatttcagcccgcgttcccgcgctaattgcgccactctggtgctaaccgcaccaaattccagagaaaatggcctcctgacgcacctcccgccctactggcgccgcatctggcgctattcgcgtcgggaacaagaggcttctaccaatttttttattttttatttttaaacttggtcattatatctttaacctcttcttgtacttataacatttcactctttggcctcttgttaattttctacctttgagtcatttggatcaagggtgatgagaaatgagatacctgtgtttattaaatttagtaagcaacttccaatgttatttttctgatgcattattctcctcagtccccacttggtcgtcattactcctcaatacatgtataagagataacttttgttctatgaggtagcatttaaactaatgtttatttcctttttagatagtttaaatatgatgagatttggagtacatttaaaattgaacatcacttaaaatattgaatcatgttgaagcagatgttcaaaagttacataattccttcttttatatatatatatatatgtgtgtgtggcatcatctaaaatgttagtcaatttattatttttcatcaaatttgaatagtcatatagccagtttggcatagatgtgcatcctacagaaatcattctgctaaaaaatatggataccagtgttctgttttcactatttttctattttggtttagtttttcaatacaattgatcctactgaaagtgatacactaaataacttgaaaaaaatgacttctgtcatcaattgggtttaaataggtccacttgcattcaagattgaggagtatgatgggagcgtgccaaatttaatcttgaggccacagtcctggacaaaggtatagatttcagaatgcatactcaagagtttgacattgatttcattgataataaataaaactaataataaatggttctaaaaataatcactattaataattttatattaagtatgttgttataatgtgtgtcaggataactgtattcacatgattctttctaatattttgttattggagggtgatgtggtgctactaatgttaatgcttatttttgtcaggtatgcaacattatttttgtagatttgccttttggaactggcttctcgtatgcgaaaaatctcactgctcaacggagtgactggaaattagttcaccatacccatcaatttcttaggaaggtacaatcactatgcgtgtgatcatgtccctgtcatcatatttcgtgctaactgcaaacttttttttcattgtagtttactttaggagaatcaatctcctaaccattctaaaaacaagctattatgatttttttcattttattactaagctacaatctttatcttgtaatctatgtagtggctgattgatcacccagaatttcttgcaaatgaattttacatgggaggtgattcatattctggcatacctgcccctgttattgttcaagagatttcaaatggtaagaaattttaaatggcttaatttgtaagatgaatcagctattcatctaatattgtctttacaatttaataatttataatgacaactttacaagtaggttgtgggtttcctcattctattaattttgtagataatgatttctatctaaagtatgtttggcaagacattttagctagttattagctttatttactagttgaaaaactcatttgattgatcgataagcaagcttttttttatagcttctctaatgctttttgaaaccctaattgaagtagcattttctaaaaagttagcttctaactttttatattttctttcgcttttatcatcgatatatttattcctttttattgttgtcttttttaaataaatcatgatattattatttttctatcattttatacttttcagttacttcaataattagttttaccgaacacttttaatttaataagctagtttttaactagattttaagctttcattaacttttcagcttctaactagttttgcccaacataaacttaatataaaataatcttataatactttgtaatttttagtttataatttttttcatactaaattacacgatgcaatattttaaattttagtcatcaattatatctgaaaatttgatttcttttcacatcttccaaatatattaacagtaaatatcattaaatataattttcaaaatttaaagacacatattttaccaagatttctttttagacgcatacaaactgcagcattttacatataactaacatatagaaagcttgaacatacagatatttatgataaagcttactgttattctgcaatctccttaattaacaggaaacgaaataggtctccaaccacggataaatctccaggtttgcaataaatttccctgtctatgctttcactacagacaatttttttttttcctctagagagtgggttttgacaatagattcaagcaagcttttcgccttttcagagttgtaatgatatcaatttcttttatggactctgaagcataaattgatcttaagatattttcagggatatctgctagggaaccccttaacaacacgaaatgaagaaaatgatcaaatcccatttgctcatggaatgggacttatttctgatgaactatatgtggtaataacagtatttttttcctgtttatttttaagaagtgttaaaagaaatgccaataattcttagacatctaccatttatgaacagtcacttcagagaaattgtaaaggagagtatgtaaatagagattccagaaatgagttgtgtttaagagatctcaaacactatgatgaggcaagtaatgaccatcacatttttattatgataatcccttctaccctttctaaccagataggttgagtttattcatcataataataaatattatttcttatcttcagtgcctttcaggaatcaatatgttctatattttgggtcgccaatgtaacgatgatgtgcctgaaaaacatgaagctcagtggaggagatctctgactcagaagtttgaggcctctcttaattctcatctcagagtgccagacataagatgccaagtaattcttgctgccttgcatagactctcttacatattttatccaccatggttcaaaatttgattacattattttacattgtagattattgggtctttcctttccactcaatgggccaatgaggaaagtgttcgcaagtcgctgtatattcgagaggtttgatataacatatagttcattttgtttagtaaattggtagtgctgcatcatagttggaaacaaattccttagtctatgttcagtttggaattagtttaaatttgagtcattgaccaaagaaagccttagcacttcatggatgtcatacatactaatctacttagcttaatgtactgcagggaactataggcaaatgggaacgttgttacacttcggattttgagaaacagatcttcagtagctttgagtttcatgtaaatctcagtgcaaaagggtatcgttctttaatatacaggtgaagattttcacatctaacattgtgtttttctgaaaactgatgtttcatgtgttcagtgtttttctgatttctaatgccgatggtgttttgttgacagtggagatcatgatgcaaagattcctttcatgtcaacccaagcatggatcagggctctaaactactccattgtggaagattggaggccatggcttctagaagaccaagttgcagggtaggaatgacactttaattagccttgatatgaaaaatgtttacttattttacatgcaaaacctaatagcagatcatgcatcagaaccagaccattactcatacacttgtatgtgttcatccaagtgagaaaagcttgggtccctttaagatttgggaccacgaggttgacccagaaattatgtgcttagagaaaatacaaatgggggtaaaggatgctttttaattttttatccgtatgaattcaaatatagtatcaaaagtttacaatactcatacactgatacaccccactcaaccaattgagctagattcccttggaaaaaggatgctttgggtacctaaacagcgatctttactagtatatagtaccggcggaaaaaatattggaataggatcggagatacaccttattcttattttccactcactatgatctaataagaaatccaaaactatcaatcctaatctcccatcatttctaagtgttttacttttcctaccaagcaaatcctaagacatcattcatgcatacaaatctttgtgaataatgtgccttttctatgcagatacacaaggacttactcgaatcaaatgacatttgcaaccttgaaggtaagaacattcaatttagatatcataactgctccttttattatgttttaagaaaaaaaaatacaacttctggtgaaatatttgtctcttgtggtgttgtgcaaatttgatattattctaattaattgcagggttcaggacatacaggtgcagagtacaagccggaggaaggttttgccatgttcagtagatggatagctaatatgcctttgtaactcagccgctatgttggcagaaatctaggttatcaatgttatgctcatttatctatgtttttatttttattttttttgaattgtcaatgtttaaagattctgtattttaaagtgagcaatgcagtagtgtcaaataactgtttgtactatcggaaactttttcttctttgatttcttttaatccgatatcttcgtattcatcaagagaacggtcttgtaaagtgaaattcctactttatgaagggaatggggaatatttggagaagttgggattttactatggaaaattaaatactaaaatatccagaaggtattcctttccctctataccatcaatatcaggattatcaattattgaaaacaatgttttgaaaaccagtttagccaatgctctggtgaaggaattgaagtggtattatcatagttgaatccgaaattaatatatttaagtattaataaaaggaaattgttgtatattatggagaatatctcacgaaaagtatgaaagtgtaaatcaacaattgatccatgatttgggtcaattttttttttcttttaatatttaaccaataaaaagaggttatgtatgtattccggactcattcgtgtatgttgtttttttctcaaccctccgatctaacatgagaaagagacccagactaattcaaagttcgaccaaaaagtaaataaaatttgatggtttctgtcaaggatcaaacttagataatatccaaactattcaaccttatcattactattgaatattactcttaataaaaatatattaaatacaattgtactatatcagcactatattaaataccaatggaattgatgtggcctgtttgttagcaatgctcatttgttccagaatatatctatttataatatataatttttgaaacataggctgttgcactgctatattagcaccctattattatgctgccatatcaaaatatattgagagtgttttttctcatgtacacattttgatttagttgtcactttgttattttcttctcggtgcttgtgctgacgagagaaaaagccaagggccacaaggagaatatatacttggctatgatttgctaatgacaccactgaggtgctagtggaaatgcttgaccaaggattttaacttaaactgcatagacattacctggttgaaggcgttgcttttgctagatggtgaaataactcgatggagtgttaaatgagacatcatataccaagaaaacacaacaaccataaaaccatggaaggagaagagaggaagggaagaacaaagctattttcgttttgctgcataagcatactgtttttcatgtttttattcgtatgtaagtgcaaatacatgagaaataactgtccatcatgatactcatacatgtcatcaaaaggcatgcacccactaacattacgagtgcagtgtcttgcgcaaaataaaagtaaattcaaaccactaattagaacattagctattgacacaagcaaccatactaaaaataagcaaccataattacatcagtaaaaaaactaattaagaaaagttttacagaccattaaatttaacactcttctttaaaacgtttcttgaacacttcaatctttctcctcggctcattaaacttagcacatgaaaggaccttagttaaaatgtctggaatttgctcttcagacctgcaatacatcaatttaatatctccattcttctcaacttctcttatagcatgaaactgatctgcttgattctcccatgttgaattggatttttagcaatagcaatagcaatgcaatggttgagttattgtcaaaccataatacaatttatccctcttgcacatgattgaagtcagtcaatacctttctaatctaaatagcttgatgtgaaactattgctgcagtaatatactctgtttcagccgaagattgaacaactacatcttgctttttggaattccatgagagcactacactgccaagtgaaaaaaacatagtcaattgtgttcattgagtcatcattagaatcacagcccaatcactatcaacataaccttcaagtcttccatctcttttgcaggaccaaatgccaaaatcaacaacacctttcaaatatctcaacactcttttgcctgcaccaaagtgtgtcaaacttgggtgcatgcatgaatcttgaaagaaaattagtagcgaaaatcaaatctggtctagttgcagtcaagtaaagaaagcagtcaatcaaacttctatactgagttacatcaacctttgcatcactatcgttcttggaaggcttttcatttacagaaaaaggtgttgaaacaagattacaactctccaatttgaatttcttcaacaaatcattgagatattttctatgtgagaaaaagattccatcatcaagctaatgcatttcgattcccaaaaaatacttcattactccaagatcagtcatttcaaaacttgcagcatgctcttcttaaatttttcaattccatcaaaatcatcacctgtaataagtaaatcatcaacataaagtgagacaacaattttcttcccattgccacactctttaacataaagagtaggctcattttagctcctcaagaaatcgttttgcagaaagtatgagcaattatgttgtacaaagttcttggagcttgtttcagcccatacaaagctttgggaaacctataaactttatcttcatgacctgcaacaataaaaccagtaggctgctcaacataaatttcttcccccgtttaagaaagttgatttgacatccaagtgaaagattttacacccgtatatattgagctgatagaacaacaattaatctaatagtttcatgccttggaccaggcacaaatgtacactcgtgtcattcttgtaaaatcatcaataaacaagatgaaatacttgtgctcataggaccacacaaataagtgtgaacaagttcaaatttgctctttgcccatgtaacattttctaatgaaaaagactttttgtgcattttgccaattgacaaacataacataaatcatcaagactgcttatcacatgcatgtctctcatcatatcatcaagacaagacaatttaaatcttcccttttgtgcactatggcatgagtttcttactaagcctagagatgtttctttctgatgattgttttcagtacttgaagattgagtaactgttccattacttttatactacaagccaagtgctaaagcaattgtcttctcaggattggacgctgaagcaatattgtctaatgattgatgctttgcatatcatccaaagcctatctgttcatgcttttctatttgtatctcatagagatatatgaactaagcgtgagatgtaacatcattccaattactatattatgcctaggtcgtaatacgtaactagaagatgttaatttttctaacgtaaaacttttaaccaaaattgattaagaaaaatttatctcaatattagaaaattacgcttatatttgagcctgtagagattttttggtctctttaataaattacaacttagtaataacttgtaaataatattccctacaataatagtaatgtccatatattacaaagcatataacaaaatactacaagtccacaacattaaaagaactcttccaacttgtcctcactttgtagttcctcctttcgatttacctttctggaatgacacgggaacatactaaaacagtgggaattccaaagaattcccagtaggtgaaaatttgcttatcatacagtgtcatcgtcatcattccagctacttcggtttattaagaaaaacatgtgaacaattatagttgatttttaatttcataaacatataacccgaagtagattcattttattcacaaacacttaaaaataagctcatacttcatcattaatgcaagcatcattttcaatcatgtcaatgcatagcttacctttgttatttttcctctttaataccctaatctagacaatgagctcattactagacttaggttgctcccgcaggatcgtgcttagcttaattgtatcaccctttggggtcccatagggtcgtgctcagcttaactgtatcacccttgggtcaatatgtctttcccgtaaggtcgtgcttaacttaaccgtatcacccgttgggtaccatcagggtcgtgctcagcttaactgtatcacccttcaggtattatctttctttagcctttcccttagggtcgtgctcgacttaaccgtatcacgctttgggcaccatcaaggtcgtgctcgacttaaccgtatcaccctttaggtcttatctttttatctttcttaatgcacatgacatgctcaatgaaatgcaaatctacataactcatgtcatacaattatgcaacaaaacatcaagatttcatcatcataaaagaaaatcataacaaagaacatcataacaacaagatttcttactacatatgattcggttcttcaataatctatactcatctaacagtcattaaattcccatcttttagtatgttaaactatacttcctaagctttctaaaaaggtatctgtaacaccccgtgtgcacccggtgtattaacattattataatatcagaatagcgcagcaaacataagcatacatcaataatggaagtctgaattcaatagaaatacactttatatacatatatggtgaatctctgtcctttacaagatacatagttcacaaaactatacaaattttccctaggtatcaaaatacagacaaaataaacaaaatgtgagctaacaagtgtaacaccccgtaggcctccgacgtgttatcattcataatatcagtttaacgtttaaaacatagtttataaaactcagcggaagctcagaatcgcttttcttgatacattatgtatgaaatcacacaaaatcacataaggcatacccctgctgatccagtttctcatagcataacccatacagacagataactaacagagttaggcagattcatcaaagatacaacagctatactcaggagaactcgtctcatatacataacatatctagttctgtacaaatatacatcagtactcacaccacatcgtgtgacacaaaagaatatcatccctcgcaggggtatacagaactatactaatcatcaggagtacacacactccatccctgctctagggtacaaaatgtaatcaacaatccaaaaatgagcctatcagctccatctgccgccatcagccaagcaggaaagtctctactcgggcctcctgccctgagactgctctcttcgtccggaagagtcacctgaaaagcataatcccccacacggggtgagataacaaatctcagtaagctcagggtccatggaggcttctcctccaccctggcccacttccatagcacatacatcaggcaatcacaagcaaatggcccaccggcctggcccactggccctcataacaacataagcatagcatacaaacatggcggagctgcctcaacgcctggcggagctacctcaacgcctaaatcagtgggagtccggaactcgcacctgtgccatcccattgggtgctaacccttcgcatggatgcacaacatatggcacctccgagaaaagaaggagctacctcaacttctaatcccctggcctgtgggaatcaatcccctgggagctacctcaaccaagagccagccatgctagaaggaaaaccatctcctagggaggtccatatctatctattggccaacagatctatcacagtcatatcacagcacaatatcaagcacatatgcatacatacatcattatgaggatgcaactaccaatgcatgcatcatgaaatgaccaccactcccccggagtgtggtgtggcacacaagatgggaattcatcccccagagacactgaacttacctggtaaggtctcagtcagcaattccttcccaggtctgtggctcccgccaacaatagtctcacaatcaatgcctaaccaaggcatatgcaatttcacatcaaaatcagaccacagacatgaaattcacaatatatatgtatacatatatacagaaatcccctatcctagggttcaaaccaactcagcctacactaggctgctctaagaccattcaaggtccatcaggatggaacacaatccatctgagtcattctagactcgccacacatatacataatctaaactttactcagcctcacaattcaattgttatcagaaagggctgagatcctctcaaagccctgctctactagcctcttagctcagagcatcacaatcaaggctctagcctatcagagaaccatcaacaagtgactctacataagtcacataggcatatacagagccaagattcaaagttatcagaatcgaaaactgaaagctaatccttcatctattcaaagccctaaacaactttctcaactggaccctgggctaattctagccccagctcatatgggttactattcacagggacccctagaatcaaaattaaacggtgaaacttgcgtttcttacctcagtggcgactccaacagcctcagaacagcttctcctagcttctatgttccaattacgctgtggttctgcgccaagctcgagttctctgagcttttccctctgaggttcctcttctcactcaatctggggtttttaaggaaattaatgaaggattcaagctttctactcggttcaaacaagtttctaaggctcaggaaggtgtttaggctgagaaatcaagtcctaggaagctcaaggacttcaacaatggaggttggggctaagggaggaagaagaaatggaaatatcctccatttctcacgttttggcctttaaaaactggtctgccgacgttctcacgcgactcacttgaccttccacgcgatccacttgagatggcagacagaaatcacctttctgagccacttatcacacgactcgcgccatatatccacgcgactcgcgccatctcttcgggccttccacgcgactcgcgtggatcccaagtgactcgcgtggagtcccagtgacaaatcatgcttcctggaccacttcccacgcgactcacgtggattttcacgcgactcgcgtggcatggcagaaccatctgccctgtataacacatatggcgcgtgtcgcgccacccttcaagtgggtcgcgccatatgccagaacagccataaaacttgcatttttaagcacctttcaccggctttctaacctgaatccccgcgctatcgcgcggggttaagcgccgaaaaagaaaaaggataagggtccttacaacaagcttggtcttctaagcctagggttctctaccatcctatcccagctcaggccttttgccttgggatctcttagtgacttctatctcagttcctgcaacacaagctccaaacaagggtgagataatcatcccagtaaactcagggttctcagaggtttccttccccctggttcactctccagcacacacacacacacacacacacacacacacacacacacatatatatatatatatacaatatagcataacagaaatcagatcatataaaatctcatcatacaactagccttcacggctcacaagaacatctgcatgcacatggccaccccaaacaagcataagcgaacaatacacagtgcctgagagagatcatccaccgagtgagtacattctctcaggactttcatctgagttcctgaataggatcatccaccgagtgggtacatctactcaggactcactcaatctatgcctgaataggatcatccaccaagtgggtacatctactcaggacttgccgcccaatacctgaataggatcatccaccgagtgggtacatctactcagggtttacatggacgcctatggattatctcaagggagatcatccaccgagtgggaacattcccaaaggggtccatagttcctcagtctactggccaacagatttcatgcaatcacatcacaatcttctcataaaagaatccaatcaagcatacactatattattgtacccaagccatcatcataaccaacacattatacactatcgcagtgtaaccaatataaacataccttatctcagggtcgagctaacactcaattgtcagcaattatcaaaccatttcatcaacatcaggcacatcattcagtatcatatcatcataagcatcagcatacaagatatatcaaacaaacacccaaagtgggtgtagtaaacacaagcaggggaaaacaattcccaagaacactaagcttacttggtcgcagctcaggatcagctcccctagtctcgtgatgagctctgccagcgatgtgcacttcacgccctacaataggcatggaataagtaatcagaaacggtgttcgaccgtttgaagggaaggaaacatccttcctattataatcaatttctgtcttctaacttaaggtttatcttagcccagctcctactaggccatgcattgaccctcagtagtctgcctcagtctgactaaggtcttagagtctcttcaagactctgtacaaaccaattcaaagctttactaataccaaaaccaacagttgttcaactcagccaaaacatatatatcaatatgtttccaccattcatttggccttatgaacaacttttgtaagggtacttaagttaatacaggccatagtacctctcattcacacacacttcttccttcccagagctaaactcaaacttcatcacaattctagtttcaaggttccacatctctcagaacaacctcctgattattcttttctaaagaacctaagcctaattccatccctatcaccaattggtcactattcatccaatctcacattccacaaattaaacggttaaaacatgagtttcttacctcagatcaatagaggaaggctggagaagtctttctcctcgctctggtgtcctgaaaccagcttctttcctctccaaagctcaccctctgaagaaactcaaagaaacgggagttctctcacaaattctcacaaccaaggctggattttggctctcaactggttctaatcaagtttgggagtgattaggaggtgtttatatggtttaggatgaaggtaggaagctcttatagctcagaaatggcagcctggacgaaggaggaagatgaacagtgatttgctctgaaaaattcacgaaatagccttttataggtggcctgaccgacatgtcgcgctcctggcgccactgtggccctcctggcgccaaaatccagtgtatccggcgcccctagcatcactttggcgctcctggcgccaatttccagcatctgtggcgctgatgacaccaaaaatcgcgaaaaatagccttctgctacagtgccacgctcggagcgccagatcccacacttggagcgccaagctacagtaactgctacagtaatttttttttagccatggttattatagtatcacatgcctcaattggagttataaaactctagatataatttttacaaatagaacttcaaatctgccaacagtctcaaaatttcacattaacatctcctagtgttttcaagattgcaagcagtaaacaatctagttttagctgaaatttttatatgttatagttgacatttagatctttaatttcatatatcatacacctaattttaataagaaataagagagaaataaatttatcaaaacggacggcagaagttgtttgggtgtggacaatttcggacagcttgagttaaaataatttttgggcatgattcactacttagtttggtcccatattttaggaaaagatagaggacatcctaaggtttaaaattagtggttaaacatcttgtttggttaagtatagagggagatatgaaaatttcaaaacagtccaaaactcagcttatagccatacgaataatctcaagtatcaaatgataaataaacctaactttcacctaccccaatcaagtttgcttccaattcctccaagtatttggctgcaccttaaggtcttgaaagaatgaaagacttgtctaatatttgatgctttggaaaggaaaggatgaaaatgaaatgaaagagatgagagagattcatgtgaaggtgtagtaggatgaagtcttgagaatgacttccacttaaggtctcccttctcccctttatatagtagttggaaaataatttaatattcaaggacataattgcccttcttagcttagtttcattcatttagttccatcctaacttagtttctttccatcccattatattctaactagcttcattattattcttttactttatacaataaaaatcttctaagttattatgttgcttacaagtgtcctaccacttgtcttcatcataaggcttttctttacaagtgtcctacttccttggcatggcctttacaagtgtcccaccacttgtccaattcataaagtttctcctatcttctccatgcttcacgtgaccactagagaaaggaagagaaatttttgcttcatttcatgttaccttgtatccatatttcttcaaggcatgacacctttcttccaaatgtcctcttacttggcatgtccatgaagtttctctcttcttctagcttattcacatggccaacaaagaagaaggagagaatttactttctttcatgctactttgtataaataattcccaaagcatgatggctttttatcccttcatcaatggtggcttacaagtgactagatgtttcttaagccttcataattgtatcttatcattttaatttatgaagcttaagatatttttctctttatcatgttttcattttcttaaagagaagaaaattatgtggttttccttgtatccacatgtcaccttttatgaagaagaagaattcattttaaagatagcttcacacatggcattccttaaaaggaagtaaagttcaatttaaactcttctacctaaagataatattgaataatagaattctagagttttccagaaactgacttcaattacagtataaattgtccacaagcagtctatacagagtgttatacagactttacatacaagattgttcttatcttaattctgattggtccatactacttttgaccatcaaaattactaaaccattttattaaataagtttattcatcctataattaagagaaaattcctcaaatcctacttatcatttttccatatttttctgatgcttgaattcttctgaataaagtttcaaagttattaccttataaaattcatagaaattatattctaaggttttctgttacaaaagtattttggtaattttttcatcctagggtactttgtaatttcatcaaactttcacaaaatatttaagggtgtcttggtagtttgtcactcactccaggggtattattgtaacttccacttcaaaatatccaagggcattttggtaatttgtcacttacttcaagggcatttttttaatttttacctcaaggataatatggtaattctcatatcaagggaaagggtaatatggtcattctcctttaatcattttttttgtaatttctctttttatctctaactaacatatttaaatttttgggattttacatgagaggttaatacataatatttatattttgttaacatcaaaaccgtaaggatttaattgtttggtacaatccaatgtgacttggacgcaaccaaactatgtctagtactctgggagaagtagatacacaaggagttttatattagtttgtctcttccattgatattatatccaattattggcaaaccaacaagtttcaccatttttcaacaaatatacaagtatttttcattgttagtttggacttttacacaaagcttatcccaagtttttcacacctaagtattgttttctatatatccacttttggttgattggctctaaaacaaatcagcagaatttttttgaagaaaggtgcatatagacaatcacccgcatcttccagacgaatttacaagttaagtttcctgtctttttctaaggatttacaaggtatgtttggagctttacaacttaaaaaatatacaaagaacaaagagcttgaagttaggagacaatattcagttcaaaatttgtagcttcaacactacaactcttttggtatttatagcttctttgacaagtagttgttgtctttaaacaatcttcatttgtgtctggtgtagcatctagagaaggtatccactgggagcattaaatattgcattaaacacaagttgactctaggctaataaaccattctagttatcttttttgagccacacttctttttgttgtcttcattggtcaaatcaatatttgtagtggcacatcattttagatgaagagagagttcaaacttcattgttctcatactttcttcatttcaacggatcttaggaaggatgttcgaacattctctgcataaaggatcaagaaatcaaagcattaactcagtctttaatgcttcacaaaactagcatttgtttgatccatcagacgtagtgtttctggatactatttccctctaatccctcatgatggacctgtcacttgaaccagcctttgatttttcatggtatgaaaatggaggattttgaatcagacacgaaaatgaaagtgattgcaattctgagttggataactttcgttgggcctagcgcattttcgatcaatagtcgtgtattggttgtcagttttggccattgcatttacacgtttcaattgtgttgttttggtttagggttatgcttcctacactcagcatatttctaatacactcagcattgtatagttgatttgcaaaaagaccctttataaaaacagacatacatcattcaatatgaggcatatggattgccaatccatatgattcatacgaattgataatccgtttgagacatatggattgacaattcatatgacttatagattaccaatccgtatgagtcatatggattgtcaatggcaatccatatgtctcatacagattaccaatctgtatgagtcatatggattgcaaatccatatgactcatacggattggtaatccgtaagaggataaagttggaaataaaaaaaatatgttgtgtgtattaaaaatatgctgggtggtgtaggaagcataacctttggtttattggcttaaaaacgatggcaattttgtgtttttgctttagtagtgaaacaattttttttcttacttttgcaatattttttaatacttgtaattgaagctgatagtgatcccatcacctatcagcttgagggaggataacaaagactatagaacattagtaagtttgttaggaagtaatttaattggggataatatgctttataataagattcttaattatgtaattttcatctttttccatcaattaaatatgttatcacatgaatatcaatatgatctttatctctcttatgcatttgatcttcatccctattatccatggattaataacaacataactataatttatacaaccacatttatttactctaaccactcataaccatatttgcatatgtagttaacaatgtattatagtaaatattttcataacactattctataaaaaatcataacactttttttttataagaatttcataacactattaaccttgtgtgatatgtaatgtttaataaccttgtgacattatcaaccacttatagaataaaatcaatcatattcacacatctccttgagtggttaggtatccttaccatcatgtttgaaggtcacattagatgatcgttgtcacaaccatcctcaagccaaattcggtatgaacaactaataataccctgatttcaaatataagattggcaaatctcaactaattttactttattcaataacactatttctaaaatactattcatttaatatgggtcttaatttcaacaagtccttattcttgatatcaaatttaaaaggacattttaaaaaattatcttatttttcgtttgagattgatgcaattaaatattgttaattaacttttttagttagcatgaaataatttttttaatatttaaattctaagaaagtactattaaaagtttagtctcataacttttgagtatcggatatcttattctatatagaaaagtttaatgatctccacgtgttacaatttatttttgtacttaaattaataggtaactctttaaattatttgagaatttttaatatagtgtttaaatttaaaaaatataattaaagtttttatttgtaaaaattttgtaattgagtttctttatttagtttacaatgacttgaaatcatcgtaaaaacgataaattgtgaagattgtttaacatacaccaatgttgctcaaggtttgtaaaaccattgtggatccttctcaagtttttaatgtagccaattttaaaaaccttaggattcaattacaaaaacttccaaatatcatatacccaattataaatctttatattttagggatctaattaaaaaaatcaaatagtttaagtacctgctcattaatttaacttttttttttatcaattctattatttaaatattaaatcatttatacatcattattttatttttcattttttacacttttcatatgcaagggtcttaaaatattttattaaaattaaagaataaagagacgatattgtaaaataattaaaagaaatatcaaaagttatcctacttttattgtaagagaaaaaagggttaaattagttttttagtcctttgaattattttttagattcgatttggtcatctaatatttttttagttcaatatggctatctaattttaaaaaatgatacattttttgggaaatatgtattttgtgacaatttaaaattacttagtggtgattttgaattgttataaagtttgattacttatcatttaaactgaaagattaaattaaattgatttaaaaaattaaatgatcaaattgtacctaaataataaattagaggattaaaaattaataaaaaatattagaaacacacgtctctaaaaatattttttaattaattaaatgctataaaattaaaagaaaaaatatatgatatgaaactctcaaaattttgttatattttaataaatttaaccaattaaataaaaagcatttaaaaagaatgttttaaaaagtgtatttataatatttttgaaaataaggtaagattttgctttcaataatcatgcttacatttataggcaatgttgtgaaaactggtccaaccggtacctggagtctaaccgagcgggtttggttactggatcggtcctgcatctgacccaggatgactcggccagacccgaccagttttgcagtgaccagatcagtttttaaaacttggtctcatgtttcaatgcttcatgctctcacgcttcggctatcaccatcaccgtcatcgcgctaccaggaaccagtccaccacgtcgtagcttcacgcttcggccgtcatggccactgccgtcgccaaaacagaaactagaaaggcagaaggaagaaaaagaggcggagagggaagaggaagaggaagaggtgtaacaggaagaggaagagacataataggaagaagtgaagcgggatgatcgaagcggaagaggaagaggatagcactgtagttggtgtagcagactagcaagaagaggcgcaacaagacaatagaaagaggcacaacaggaagagatgcttatatatttggggattaggatttttgcttatttaggcataatttgatcagatccacgatgttgcttcctgtactccttttattactttctcagtttccattttgcatttcgaaatgggctcctttggacccaaagcctgcattccgttgggggaaaatggcttttccattggagtggtgcttcatacaccatttcatatttcttctacaccatatatttttttaaaattccagaactgcccctgcataattggtcacctatttgagtgagctgagcacgatttcaaaagcttttgggtattgttgttgctgattttcgttcggctgaggcgcatttcaaaggcattggtatttttggtggcatttccttgatttggtcggagttgtgggtggttgccggagattttgtgtcgtcgaagaagtgtgcaaggtgagtggtctgatctggtttcgtacggattcggtaatccgtatgacttataccgtatgtgttatacggattaaccaatctgtatgagctatacgaattgcctgatccatatagcacatacggattgcgtaatctgtacagattaggtttgctttaaattagggtttttaaaatgttgaacagcctgggtttgctttaaattagggtttttaagatgttgaaattattacaaatatgtatttgaataaaattgagtttattctgataaattattttatttagtgattatatagatttaattgttgtatagacataacaataaatgcaatttaattattgaaggacatgtagttgaagatatgcagttgcacatactaataataaaaaaacaccttgaataactttgatacacatgacagacgtacatgaaacaaacataacttaacaaaatgtaaataacagaagatggtgtgtagtgaacatgtcctcttgttgcatttcaatggttgtagtgaacatcatgtccaacatctgcgttggttatttgggcttcttgggtaactgatttgttgaaaatagctaaaatttcaattggacaaaaacatttccagtagttggattctgctaacatctttaagacgtcttcatccgttatcaactctattatgtgatattcgattgtgtattctgaatattttgcatgggatggttttcgaaaaaataattttcttaccacatgtgagtcgtgaattccataagggggggccctataagtgcaacttgcttgatgacatccttgagtgtttgaatgttgcatgtagtaggaatttcaaatcttattggatttgttccagtgaaggaataacccacaaaattggcttgtcgtggtctgttccacttgccgttgtaatataagattgcatcatgtgtatgattgatggtggatcgaagtaggttgagtataccatcgggtgttctgttgatggtacataataattctatagggccaacacatgagtattgctcactgcacattaacattgtgcaaacatcatcatcgtttctgagttgcagacaatgaaaaacatattgttgagctacatctagggatggttgtcggtagaagatttcatgcacaaattggttattggttaggagaagggtgttgtgcattctagtctttagtgactgtaacgaacactcattaggaactcgcattggtattggagtaggacattcaaaagaaacaccagtttggttgtgtttgattgatccatttggaaaaatgaatgctaatttggagttagaaatggtttgactgcttttttctcctaagaatgccatagtagtgagattgaatttttgttgagtaggtatgttgtgcgagaggctatggttttgttaagggttttttgtattacttataatagttgtgtggttgtgtttctgttaaaggttgtttggtatccaatgttgatttagacatgtcattattcaaatttgtcttttattgatctgcaacatagtgttgtcactttcgactgagggtttaccctttcacatgtgttctgtaaaatttggaactggcatgtgatctgtaaaatgtgcagcatttgtcatagtgttgtcaaagtcatgttacggttccacaaggtgtaccaggcatgtgttttgatagcattaatgatagtcttgtcaaggtcatgttacctttacatatggtgtttcataatttaaacattataactttatttatgttactagaaatgttattattatgcgtgtgtgtttttataggtgttcacatggagtgcttttatgttaaattaaattgttatttgttaggatgaacaacgatgaatggatttatgatagtataatgttagaagaagttaatatggatgaagacattggagcagacgctgatgcgtttgaattcaatgaatacaatggtgtcgacccggatgcgtttgaagaaaatgcttgcttaattgattgttctgcagcgttccaaaccaatgaggtagttatttgtatgttaatgtatttaaagttgttatatgattctattatggatattaaatatgaattatccatttgtgtaggtgtttgaatctcgtgatgcagtattgaaatgggctcgtaccactgcatttgagaatggttttgtagcggttattatgaggagtgacaccaaaactggaaaaataggaagaacatcatttgtgttaattggttgtgaaaggagtgaaaaatatagagcatggaaaaaaggtttgacaccctcaaacaccagcaccagaaaatgtcagtatcctcttaagctgcagggtaaaccaatcccgggaggacaagggtggatggtgaagctaatttgtggcaatcataatcatgaattggcgaagtcattttgtggacacccatatgctgggcgaataactaaggaggagaagacgattgttgctgatatgacaagattcatggtgaaaccaagaaatattttgttaactttgaaggagcacaataccgacaatgtaacaagtttgaagcaagtttataatgcaagatatgcattccgaacgcgtacaagaggtgataacactgaaatacaacagataatgaaacttcttgaacgtgacatgtatattcattggcatcgagtaaaggatgacaatgttgtacgtgatttgttttaggaacatccagatgcagtacagttgagtaatgcatatcatatggtgttcctcatagatagtacttacaaaacaaacaggtacatacttcctttacttgacattgttggtgtcactcctactggcttgacattttcagctgcattttcctatttagaagctgaacgcatcaacaatgttgtttgggcctttgaacgatttagagggatttttttgaaaagtgaattcttcccgaaggtgattgttaccgatagagattcagccttgatgagtgctgtgaaatgtgtttttccagattgaaccaatttattgtgtcggtttcacattgacaagaatgtaaaggcaaaatgtaaaacttatgttaggcaaagccatgcatgggattatgttatggaagcatggggaagtcttgttgactgtgctactgaaaaggaatatgatgaatgtcttatgaagtttgatattgcatgtgcaccgtggcctacatttgttgattacgtgaaggacacttggttgaatcctcacaaagaaaaatttgtgacagtatggacaaacaaagtcatgcactttggaaatacaacaacaaacagacaagtttgttatttgacattacttacattgacatttccataagcttattgtatattagttaattgattatatgacccatatgcagggtggagtctgcacattcgaccttaaagcgcctactactgaatattattggagacttatgcactgtttgggatgctatgaataacatgctcatcttgcaacataatgaaataagggcatctttggagaaaagcacgcatgttataggacatgtttttaaagttactttatacaagcgacttattgacatggtatcaaggtatgctttaaaccaaattgctgctgagcatgagcgagtccattatgcaggaaaaaacccttctcggtgtggatgtgtgatgagaacaacacatggtttgccttgtgcttgtgaacttgctaagtatgtggttgggagcattccaattaacaacgttcatttcttttggcgaagattaaacttttcaaatgaaggtatgcatggttatgaagtttccataactgaagaaatggaagccatatccaaccggtttgacaagcttgatttgtgtggaaaaataacgctgaaaagtaagcttaaagaaattgcgtaccttgatttgaattccatgtgtcctcttcctgataaggtgaaaactaaaggtgctccaaagaagaagatgaaaaagcacgaaaggtctacgagaagggatccgtcatactttgagtatgtagacgagtttcattcagtgcagaatagttgctccacgccaaaacagtgaaattcctcatgtgatgttaaggtgcaacacgggatggttccaatgctagatcaatttcatccagttatgcagaagtacatcttggatgtcatcgatgtgaaagcaaatggtaattgcggataccgcgtcattgctgccttattaagttatggtgaagaatcttggtctttggtacgcaatcatttactcagagaacttggagactggacagatggatatatagccttatttggtggtatacatagatttgaaaccttgaagcggtcctactggttgatggattatccagggtaaaccgttgtcttctttaatcattatatgcctttaataacaagccaaatactacatattaattatattacaatatccgtttatttacatgttactatggataagtggatggatattacggacatgggtcatgtcattacatcaagatataacgtaattgtggtgtccctttcgcttcaacaaagtatgacattttttcctctgagaagccaatcccctagagatccccacgttcatcgcattttgtgtattggtcatgtttttggtaaccactttgtccaggtatgacatttttttttttgtttattttacgccaatacatgaatatggaaaactcatgattgtctcttgttattatttgaaccaggttattttaaaagacaattgtcctttgccgttgatagcgtatttgtgggatagtcattgtacaaacaaagcaaaagattggccgagtaattacattagtagaatgcaaatgtttagtagatgtatgaattttcgcactgaacatgtagacttaggagatgtgtagaaactattgaaatacaataaataaagtgttctttgccataatcaagtatgcacaacatcaaaaataagacataatagtactacataaacaaaataagtctgaattcaacactagtataaatgactcgtggactactcaaaggcgcctccgctgtgtatgtcgtctgccttggctatagactaggccgtggtcgctgacactacgagctaggagcaacatctcttgcgtcctagagtatgcttcggagccctctgtagccatcctgtcatctatgaaggcttgtaagccccgagccaatcgttggcaaatagcttgcaattataatgacataaacaaaatattacccaacgtaatataatcatataaaacactacgtaaatacatagacatatttttaccacaacatgtgctggatcaaaagaaggagctggatcagaatcgtgtggtgaagggggatgaacatctgctgaagggtgaggagcagtgtcagaaggaggagctggatcagaagcaggcgtagatggaacatgtgaccgggcctatgcatactgtgtcggagtcagaaaaggatgtgagatccgatagaaccactccaaatatccaggaacatagtgacttggataatgtaccaagtcaccggtcgatataaggtaatccgtgtagtggtcccatcggtcattaaaatcatctgtggagggggcttccgacaccgccaaggctggaatatgctgaatctgtccaaactgcctaactacccggtccggcaagtacctaaccacgtgcggaccccatctaatgaacccagagaataaactaatcggctcaaaatcccgaaggggtcggtgctccgcatatggtgtccagcatatgtcatcagctctcaacctctcaatgcgggcacggtaggtcatcaatggtaacgccttcgcagtcttccagagacaggcacgcggttgcgtctcgtaatatatatccatagcacctccgtccactacagtgggaaaatgctcatatatccagcactacaaatggaaatgattaaaatcagaaataattcaaaccaaaacaaaccgacacacacacaactaagatgcacaagattacctgtaatatagtaatgtagccagttagatgctttccgtggtgttttgatgcataactaagattctcatacatatgcaccaaagcaccagctccccatgcaaaagccacagctccattgatttcccggaaaggctctaagaattggacgcctatatgtgtcgcactcttgttggcaaacaaagtgcagccaacaagatgcaaaagatatgccctagctgccagtagccactgcctagcatcacacagcctgaagtactgctcccgaagccaggacaagcgaacatatgccccgtggcactgtgtcgtctcggcttcggcctcatctacagtcacgtccagcagctcaaccagcaaagtaatggcctctccaacatctatctggtcataggaatggaagactcccatgacagggatgtgcaatagagaggcgacgtcatccagcgtaatagtcatctcgccgaccaacagatgaaacgaggaagtctcagcatgccatctctccacaaaggcagatagcagtccccgatctccagtgtccacggagcaccgtatcagcggactgaggccagtagcagccactaacccctcaatctcagcaactggcttcccaaatttagttagcttatgcccatgggaagccaactttagctttgtacgttcctgcaataattacatgaacacatgtatacaatgactaataaccacagatattatattgtccaaggagcaccgtatcagcggactgaggccagtagcagccactaacccctcaatctcagcagctggcttcccaaatttagttaccttttgcccatgggaagccaactttagctctgcacgttcctgcaataattacatgaacacatgtttacaatgactaataaccacagatattatattgtcctagagaacttgtcttataattacctctcctaaccagactctaacagccacatggtccgcataagcagtcaagattgaacagtcttctggacgtcctggatatgtggttcctacgtcacctgtgaccggtaaatcctcctacatgtgtggatcctcaactggagcatcctcaataggaggatcctcagaaacactagcacccgccctttctcgacgagcagatgctgtaggcctacgacgctcatgatctcgcccaacgggctgctgcatgcctcctctagtcctagccataatcttgacaacatttcttaatatgttagtttatctgttaaatctcataccaggttcaacaagtacgattcacatgcatgatcacctatcctgttcaatcctcatcaaacaatcccataccgggttccaagagaaatactaatagcccaaacgacctaataaaatctagacaaacacgcaaaatacctaaagtaagcaagcaaagatttagaaggtgtttgtttcacaatcacaattcaaagacaattaaacatgcatcaaactccagttgttgctcttttaacttggttacttagttattacaagagatacatggatcaatacttgcatgatgcacctgtctgatgaatataaatgtgtaacccactttcttttgtttttaatacttttctccagaactttttctttgacaaaaaacaagtccaactccatgtgcttggttctggaatgtagaactgggttgtgagccaaggcaactgtgctcatgttgtcacgaaagaccactggtatagtgtgtctcatatgtaattcaaacagttaagtctgaatccaggttccttcaacagtaccaagagctaggcttctatactctgcttctgtactagatctagacacaaccttctgcttcttagaccaccaggacacaagattaggtactagaaaagtctacactagagttggttcaaagtgggtccagaaataaaaaatagacaaccatgcaaaatagctaaagtaggcaagcaaagattaaggaggtgtttgtttcacaatcacaattcaaagacaattaaacatgcatcaaactcacaggaatcttcatctatacacaaattttcatctatacaagccactataaatcatatgccatcaacatgtatggctaacaatgacaaaatcatcttcctaattatttaaaaaccatgtcatcatcaacatatccataacaattcataaaatgctcctaattattgaaaaaagcatcttttccaacaaaaattgcctcatacggattacaggatccgtaaacctcatacgtatgggttatacggattacatgatccgtataatccatacggattgcccaatccgtatgaggtttacaaattacatgatccttaaacgtcatacggatcatgtaatccgtatgcatcacctgctcccaaaaaacaacccaaacccaaaaacgggaacgccacacttaccttaagaccgtcgtctattgccgcagagcacgccaccagccaatgcacttaccaaagcctctccgaaatgatgaagaaaacctaatggattaccgaatgaacagtgaggaagacaaagagcggagtggaggagcagaaatgataggttttataatttttaaatacccaagggtataatgggatttgcacggttggttaatggtgtagaagaaatatgaaatggtgtatgaagcaccactcttttcaatggctcatttttggaaatgtgttttaaattaggtagttgctatttacacctttttattattaatacactttacatgtattatcaattttaatgcttcaattgttattttgaatttttaagtatagaactatgaatgaacttttcttcatcaaataatgttaataatatatatatatataatataattctgaatttttttaatgtaaactgggttaaaccggaccaattactgatccactgggtagaccactaacccactatttcaatggagtcaatgatcggaccgataaaaatattttttaattaattaaaatttattaaaaattataaaattaaaagaaaagaaatatgatatgaaactctcaaaattttattattttttaataaatttaaccaattaaataaaaaacgtttcaaaaaagtgttttaaaaagtgtatctataatattttaaaaaataaggaatcacgcttacagttacaggtgatcaactgatcataaacggatactatagagataagcgctgccgcgctggataggcacagtgactcaaacacagaccagaccttatctactttgtattatttatttatttaatttcgttttttcggaaacgaaaaacgttattgttgtgttttatactttatagtttatacagtttttgtctgtttattcatcccactcgtaaaaatatattacagtaatcttatttgattccaaaagtatcgtttaaaagatacacaaatcacctgcggtgaaaatatctgtacgattcaacgtttgatagagttcaaagaaataaaaataaataaattgagacgaaatttttaaattaaaataaaatgtaaaagtatgagttttatattattttaatatttattttttcatacacccctgatcattttagttttagaaatcatatcttacaattttccttcatggttcagattttacccccaatcaatgtttctccctctaactttttaattgaatttaatttttatattgttttatcttctcgttcatgcactatacagagcaagctacgaaagtttcgtgttcttggcactcacaactactacccccaagattcagaagttgaaaagaagagtttgatcatcaaattgaagttcaaatccgtttgggtggctattgtttcagcaagtttgtgtcatcatcatcatcatcatcattcatcaataaacatgtcaaccaagtttggaagattggtgcctttggttttttccaagaggggattttccacctccaccagcgttcaaaagggtggtggtggttctgaggaaggtttgaaatcattgaacctctgttctgcaattaatcaggctctttacattgccttggactccaatccccggtgggcccctcttatttatttatttattgaagagatatctagtgagagcatgataggtgataagagcaaaatcttgagaatatatattcatacactgatgatcacgattgctttaattttaatcatccttttcgatttatgtagttaaaattcccaacttattgggtctcatatggtgtcatctttaaccttatttgtttcctgtatttatttttgtagttttttttactaatcctatatgtgtagatatgcacacgaggaaatcttattcattgtacttgttttattggttttaaatatcggttgcggttgcgttacggttttgttgcgttggttgatatcgcgaaaaatcgtggacgaatgcggttgatgcagtcccaattgcggttgtggatagtttaaaagaccttgatgttgtggcccaaatcacgggtgcatttttaaaaccttggttttgactaaaattagtttttcaaactgtgttgagttgttgtcttatgctttggttcttaacttgtctgctggattattctttttaattacaatttacaagttactgtaacttatagatcaaaacaggtgatgaaatggtttgaaaaagtcctttagtttttgcaattttgatgggtatcagttgcattgttttccctgttagtctggaaggcgattggagtaccaactgtggaatcaataataataaaaaaaagtcaagagtgggagactgagggggaaagaaacattggattgtaatatctaacatcattccaagaaactttcaattccttgagttttttattttgagttcaatactttattttagattaggggcttctgttaaggaagtgattatgtaggttctatgtaggattcaatagtgaaggctacaaatagtttctggtaactcccaagtctcaagtcccttgtgtagaacattattttgagatttaatggaattgcgaattataatataaaccaagctttgctcacaaaagttgctgttggaatctttgtattcagcacttgagtaaacaaagtctattaaactactatttagatattatatatctcaatggagcctaaagatgtttgagaagttgtatgattctttttcttttattattaattcaattgacaaactgaaattgatatgaagtttttgtgttataacttacaagtcccactttaaagttctattcattgcactctgtatttcagcacctgaataaacaaactctattgaagtgatattcatatattatatatctcaattgagcttcagcatgtttgaaaagttgtatgattctgtttcttttaatattagcttaattgacaaactgagtttctatattacgtgtatagctttaatgttctatgcgttgcactattatgagttgtttttggataacataaatatctttcggtacatccttatcttctctttcacatcgtcacagttcttatgtttttggagaggatgtaagctttggtggggtcttccgttgcacaactggattagcagaccaatttggtaaaatgagggttttcaatactccactctgtgagcaggtatatatttttacgtatttcacatttcctctgtgcttcccttttcattctctccacctatctcccatgtaaatatatatagttaagaagcacaatgaaaatatggttctaatatcacataataagaagtaaattcttgcatccatgagaagacgaaagatcattttctgttcaaggggaaaagaagcataaaaaagagcatcttcctctgaaattgtatccaaagaatttgattgtgcatttcactgtatttcttctttttgcactatctttctaattatttgtgcaatttgtatatcgtaagaattgacttaaatattttatgctgcaatgctactgacagggtatcgtgggttttggcattggtctagcagctatggtgagtttctgagattaaaataactcatttctacctttaccatcaaaccttacgatggtctgatatatttaagctatttaattatatatttttcctggcagggaaatcaagccatagcagaaatccagtttgcggattacattttccctgcttttgaccaggcaagcctccttcccatggcttggtttagtcaaagcctgttttgattagtaattgacaaattttggtttccagattgtcaatgaagcttctaaatttagataccgaagtgggaaccaatttaattgtggcggtaaatttcttttactgctttggtgttgaagtttggctcatctctattttcacttgttgcattaaatttttttacacatttttataggtttaacagttagagccccttatggagctgtgggccatggtgggcattaccactctcagtctcctgaggctttcttctgtcatgttcctggtatcaaagtatggtgcttttatatggacttcagttagttagatagaaccttatttttctatacttctatttcttgtccctgtttttcaaataataaagaaaacgttcaaattctaaaccaaaggtagtatggctaggcaagagttgaaatccatgtgcatcataaattgctcactcatttcaaaaaagttgtatactaagttctagttcttagattactataacatctgaaaagaagatggaagttgttaatgtataaatgtatattgaaatgagccaaacatattgaagtagactgttatttttattagataacaggtgtgatagaggtaggtggggccaaatgtactctaggaggtgtaaataggaatagttgctgatataacagaataaggagttagttaaaactaactaactcagcccatgtataaataggagagctgagagaatgagaggggtacgaaaagagtgtcaccgggaggttgtgttccctcgaagagcactttgtaactgcaggagtttttctccaattgaatagaaattcatttgatttccattcttgcgctttccctctgatccagttcctattaactggtatcagagctccaatcttggggctttgtgtggtagatgggaacgaagaagatggatgctagaattgaggctttggagcgcgcaatggaagaatcacgcgagagtagccatctgaaccaggttgcgatcgagagtcgactgggttcgacggagagcttgcttcagcggttgacggcgaagctggacaatgccgacagggaggatgcggctcgcgtgaaggagaaaaaaggacagagcaaggggggagacgacgcagcaacgcgaaattggaggcacttagatttgcctgtgttcgacggcgaggatccggttgggtggcttgcgaggattgagagatatttcctgttgcaggaggtgagtgagggagagaaattggaggcggtcctggtagctttggagggagaagccttatcgtggtttcagtggtgggaagaatggagcaagactcggtcctgggaggggttccagagggcggtggtgcagaggtttcagggggcaggaatcgcgagtccatttcaggccttgttggctctgaaacagggagatacagtgaaagaatatattgggcaatttgaaaaacaaatgggagctggaagaggtttggatgaaaattttcttatggaaattttttgaaagggctgaaggaggagatagggacagaggtgagaatacatgagccaaaatcattgatggatactatgattaaggctagacagattgaggagaagaacagagtgttgggaaatttaccaagaaatgggaaattgaacaattcttttcaaaggcccactttcttaggatcaagaactgtaagggaatggcagccaggaggagttagaggaggagaacaatcagcagtggtgaaggttggaggagaaatgaaagctggaggagagggatggaataagaagaaacctatgcagaggttatctcccatggaggtaagtgaaaaaatgaggaagggggaatgttttacttgtaatgagaaatatcatgtgaatcatgtatgtaaaaataagcaattaagggtcatgatcatggaggaagatgagaaagacagtgaggtggaggagctggaaagaggggaaactgaaaagaagaactgtaccagctttctttgtacagtattcagggatttacatataaaaaatctcttaagatgtggggagaagtaaagggaaggaaggtagtggtgttgatatattgtggtgctactcacaattttatttccatgacagtggtgagagaattgcagctggaagtgactcctacacagccctattttgtggaagttggggatggacataaggtgaggtgtaagggaatgtgtagagaattacccatagagttgcaggggttgaaactggttcaaaattgttatttgtttgacttaggaggagctgagttagtattgggaatggagtggttggctggtttgggggaagtgaaggcaaactttgagaaaatgtcaatgattgtgaagatccaagataaggaagtggagttaaaggctgaaccagaattgattaaggctgctgttagtttgaaactgatcaatgggaatttagaggaagatgatcagaagttcttggtagatgtaatggaagcagaaaaaacagaagaagcagtagcagtacctgcagagattcaacagatcctgaagcagtttgaaggagtttttactgagccaacagaattgcctcctcatagggaaagagatcatgctatcacactgctgcctggtaataaaattcctaattgcagaccttataaatatccacattatcaaaaagatgaaattgaaagattagtgggagaaatgttgaaggctggaatcattagggccagcactagcccttttgcaggccctgtaattttggtgaagaaaaaggataaaagctggagattttgtgtggattataggcagttaaacaaaatcactgttcctgacaggtttcctattcctgtcattgaagaattattagatgaaattggaggtgcacattggttttctaagcttgatttaagagctggctatcatcaaattcgaataaaggatgaggatgttcacaagacagcttttagaacacatgaagggcattatgaatttttagtgatgccctttggattgaccaatgctccttctacatttcaagcattgatgaatgaagtgttaaggcttttgttgagacagtttgtactggtttttttttatgacattctagtttatagcaagtatttggatgaacacaaactgcatctgcaggcagttttgcagattttacagcaacaagagttgcatgtgaatgaaaagaaatgtacttgggctcagcaatctttggagtatttgggccatgtgatttcaggggagggagtgcaggcagatccaaaaaaattagcagccatgagcaaatggcctattcctcaggatattaagattttgaggggattcctagggttgacaggatattatagaagatttgtgaaggattatgggaaatgggcccagccattgaatgctttattgaaaaaagatgcattcaagtggactagggaggctgagaaatcttttgagaagctgaaagaaatgatgagtacattacctgtgttaatggttcctgatttttctaaaccatttgtgctggagactaatgcatcaggagtgggattaggagctgtgctgttacaggagggcaggcccttggctttttggagcatggctctatcaggtagaggacagcttaaatcagactatgaaagagaactgatggcagtggttttagctgtaaaaagatggagacattacttgctgggagggaagtttattataagggttgaagtttttaaatgatcagaaattattgactgaggagcaatttatatgggctgcaaaactgattgggtataattttgagattcagtataggcctgggaaagaaaacattgtggctgatgccttgtctagacaatttcatttttctgctatttctttggtacaagaagaggagtggacagattgggaaaaggaattgaaagcagatcaaccattatatgagctttttcagggaattgtcactaagacaatggaaaagcctggctatgaagtgaagggaggaaggttgtattataaaggcaggttagtgttaccaaagaactctactcggattcctttaattttgaaggaactgaataattcccatattggagggcattctggattttttagaacatataaaagggtgactgatgtggttttttggcaaggaatgaagaaagatattaaggagtatgtggctgaatgtgatacatgccaaaagaataagagcagcaccttgtccccagctggattacttcaaccattacctgtgccaaccaaggtatggtctgatatatccatggattttattgggggtttaccaaaagcacaaggaaaggatactattctagtaatagtagataggctgactaaatatgcacattttttggccttgtgtcatccatacacagctaaagaagtagctgaacttttcattcagggagtggtaagactgcatggcttccctacttctttagtttctgatagggacaggctattcatgagtttattttggaaggagctgtttaaaaaagctggaattgagctgaaaatgagctctgcataccatccacaaacagatgggcagacagaggtagtgaataggtgtttggaggtttatttgaaatgcatgacaggcagcaaacccaagcagtggccggctcatttgggttgggcagagttttggtttaataccaattacaacatttctgccaaaatgtctccttttgaagcactttatggacagaagcctcctttattacttaaaggagctgatattccttccaagttggaagaagttaatcaactctgcaaaaacagagatgagcttttgatggaattgagggaaaatttattgaaatcacaagatcaaatgaagaagcatgctaataagcataggagggagttgagctttgaaattggagattgggtttttctcaaaatatagccctatagaatgagatccctggccaagaaaccaaatgaaaaattgagtcctagattttatggcccttataaggtcatccagaagataggagcagtagcttacaagctggaacttcctgttggaagtaaaattcatcctgtatttcatgtatccttgctaaagaagtcagttaaaacaacctgctctcctcaaccattaccagcagttatggatgagcagtgggaacttcagatgagaccagaaaaagttctgcagcaaagacagaatgaacagcagcagcaggaagttttgatcaaatggcaaggtctacctcatcatgagaatagctgggaattagctgaagaaatgaagaaagtctttccagatttggaccttgaggacaaggtccagcttcaaggggagggtattgatagaggtaggtggggccaaatgtactctaggaggtgtaaataggaatagtttctgttataacagaataaggagttagttaaaactaactaactcagcccatgtataaataggagagctgagagaatgagaggggtacgaaaagagtgtcaccaggaggttgtgttccctcgaagagcactttgtaactgcaggagtttttctccaattgaatagaaattcatttgatttccattcttgcgctttccctctaatccagttcctattaaggtgcttttgactagctgcgtcaataccaatgatcagctagctgacattcaaaatctcaccaagtcccttaggggtacccattttgggttcttttatgacaaattaggtgcacagaatctgtatgctccagcttaagagggagaattagtgtatatatttatactaggttctctagaattttgataggttgaactagaatagttagtagtatactttatcaggctcgatataacaataagtcatggactatacatcatttctttcccttatggtcttgcatttttccatattgaatagccagactttccatacatcattcctttcccttttattttcatagatttggataatatattctgaaatttatggccgtcttgggattgcatgagatggcatatcactcaattcttgtaggaaaacaaaatttcttttaactttctgtcttttttacataattacatttttcccaaatgcctcaatagttccttttataggtggtaatccctcgaagtccacgacaagcaaaagggttattgctatcttgcatacgagatccaaatcctgtagtattttttgaaccgaaggttttattatactaaattaaccttaatgaattatgtgcacagtatggctttcacaattttaatcatgtgattcttggttttagtggctttatcgtttggctgttgaagaagtaccagaggatgactacatgctgcctttatccgaggctgaggtacaccacatgtcacactaaataaaagaaggaatagaagttctgcttaacattattgatgcattattctatgatgaatattgaaatgtgtattcaggtaattcggcaaggaagtgatgtaacacttgttggatggggagctcaattagctataatggaacaagcttgtcttgatgctgaaaaagtaattgcctttgcattgcaactgaaaactcttaaaaaacataatcctgcattacaccatatttttgtttatttttggttatggtggtcgagtcatactggagaatttcacttgatgcaacctaatacacttggtatgtagagtcaatttttccacaaaagaacggattgggttgcaaccttgtatgcgtgattgcattagatatggaagggaaaccaatttgaatagaattaggtcttgcgatcaaatagtataaaaaaagtatcatgtatgtgtaaagatttatgacaaagtctagtcagaatttcattagcgcaaataaattcaagtattatacttatccaatattttggaatactgaaccttgaaagataaggggaaaataggcaacagacaacaaatgatgagtgcataattttatgtcatgtcaatgaacatatgtcaaggtgcaatttttgtttaatgcagctgagtaggacatcaatttggattggggatattctatatttttcctaaatacaccgagggcaggcaggaaaatgattagttatgttccagcttgcatggaatacatcctctgtttcggagtaaattgtgattttgaaaaaatagcttatattagaacaatcatcttagctatttttataccataccaaatataaggatcattatttcccttatttgaacccacaatgtagttttcaatgtcacataccatactaattttgatgaggtttgtgttagagagtaaatttattgtcctacctctggtcttaaccactttcacaagaattaagaaatttatttaatttagttagtgatattaagtttgtcattaatttgtatgattttttctagaattacccttaaaactattgggatttcattctcttgtctctttccaccttactaattaatgtatcaccagttatgtatagtttttttataaaaaaaaaaatggtaactaaagcattagataatttgaaggaaatcttataaaaaggaccaagacaaacatcccaaaagattcttatgaaaaggatcaaaggtagtattatccttgtacttgacctaattcatcagtaaaactacataaacaggtagtctaactaaaacaagtaatatcatcccttgtacttgctggctctcctaattcatccttgtacttgctggctctcctctcttattttctaaggactttatgagtaacttgatattcttttaaactactacttggtgtcaattcataatttatgtgtttactgaagaacaaagtcgttctgttctgtaaaagaaagtttggcattacaatttcccatttctgcgataatataaggatttcatttgttaagtggaagtctagattttatcttaactgagattctaatgctattatgtgattcatcaggagggaatttcttgtgaattgattgatctgaagacactaattccttgggataaggaaacagtagaggcctcagttaacaagacaggaagattgcttgtatgtatacactatactgtttatagaataatactgtaacctatttggtgtaaccttacatgatgaattgaatgtacgctgtaggttagtcatgaagctcctataactggaggttttggtgctgaaatttcagcttccattgttgagcgctgcttctcaagggtatgctcagcctcttattgcaatttccaccacattgtgacccctataattaaataaacaaatgtatatcttatatatatgtgtgtgtgtgtgtgtgtatatatatattatgagaaatttctaacatggcatcacatataaaaggattcttttttctgttgagagtttggatcactaattcgaatgattcaataccatgtgcctatatataaaaatggggtaacaagagcatacaaatgtatgcttagcccatagaaatattcttatctacagattttcctttctatttctactctcaacaaagggtaatgttcatcttcattagccttctccacaaactttcaagaagtctcaaaattcaccacaggacaaactggaaaaccaacaattaacactttaccagagttgaaaaatagtcactaaaggctagagcctgtgacaagaaacttcttaacaaaaggaaagacctagagcatcaagcctccaaaatgaatagttggatctcaaaacaccaaaatccacctaaaggaataaaggcatggtcgttttggattgtaaaactgtgcacacttctgattcaatgaaaacttccaacaaaatggttatatatatgtgccttcaaatttaaccaaattcaaccaggacatatttcaagcttgtctttcttttctgtggcacagttagaggcccctgttgcaagaatttgtggtctggacactccttttcctttggtttttgaacctttctacatgccaaccaaaaataaggtaacttatttgtttacctgaatttttcttcatttttatatatttatttatttatttatgtgtcatttttaagagctgtcttcactgatacaagcttcttactcattcaatgcagatattggatgcaattaaatcaactgtcaactactaatgagcttagtcaccattttttggccatatataaggtcttgatgccattgggtgatgcattcgtatattgcaccatggagttaggaggttatacaaaaatgtaatatagatgattagcaaaaaaagaacaatgggcatgcacatgtaacactattaattttctcttacgaggccctgtgtactgagaaacatcaaatatttgaagagactgatcccattagtaaatctcctataataaatggacgttttccctttaaatgtgaagttgataactcaaatcaatcaaatgtctacgtcctaccaattgtagcttgcacgttatatatatacatatacatatatatacatatatatatatatataattgtcatgtgtcattttctcgctcattcttaaaataaatacaattaaattagttttaaaatataataaatgcagatttaatcattgatttaataatttcattctttcattaaatttaaatttttggttcaaattagaaaaagataaacgtgtcaacactgattttctaatatatatttgaataaaaattggttttaaacgaaaataattcatctagagtatactttgaaaaaagattaggtttaaatgcttcgtccctgtatttcttatacttctatgaaaaaattgtttcttatatcattgagtgcatctttatatgtttaaacttttatttttttttaaatgcttattttctacttttttatactatttctattttttttcctatttttgtaattttaaaatcaatacattagttcaattggttaaacatggtgcacgagtattgttgtaaatccactattacatgttttcagtttttgtaataatatttctattattattattattattattattattattattattattattattattattattatcacttaaaataatatacactaaacaataaattaaatagaaactaatttcaactgctgactcttgcttatcttgatgtggtcaatctgatgacactcgacctcattggtctgggttcatgcccatttgaaaggtgtttgcctgtgttttaggtctaattgtcttctaacccatttgactaactcttaccttatattttagattttgcactacctttcccttggtcaatgttgttggtgtatccatgtatgttcttccatcatttttaggttattgttaaattttcagctttgctacctttttggtattgtcattgattttcaatgtcatcctttttttgtccaaaatgcagtatgatcattgtctgttcaaatgaaatctagcacttaatcccctacctgaccttgtttttgtcctagatgtagtttggctctagctccaggtccatgagtcacctaattttcacaagtttaaaggttagtaaacttttgccactggagatatcttagaatatctaagaaacatctcataatatgatgattatatttatattaaaagtatcttatatgatctattaggagtggtttatatatttctttatatttctcggtttactttcttatttgattttattagtattgggagtctagaatgagtatgaatggaggtcaatgctttatattttgtatcacaccaatatagataattgatgtaatacctcgaattttaaccatgtgtttaagcctaggttaagcctggattaagctttgagattagtatctaagtttatggattagagttcctgagaaaagaagcttaaaaattgcaagttttaggctgttatggcctgcggcgcgacccgcgtgaggtgcggcgcgacccgcgtgaggtgcggcgcgacccgcgccagatgtgtaaatcagggcagatggttctgccatgccacgctaacagcgtgagatccacgctagtagcgtgggaagtgccctagaaaaccatgttttcctctggagctccacgcgagtagcgtggatgtccacgccaatagcgtgggaggcccgagcaggtggcgcgagtagcgtggggaacggcgcgagtagcgcgggaccttcgggcagcttatatatataaagctcatttggacgaaaatgagggaggaaaaagagagaggaagccattgatgagttacagagcttcataccttctccatctctcatctaaacacctccgacccaactgagaaagtgatcaacacctcgagataagtgagataccccgattgattcttgagaaaaggtgagaaatagtgagattgatttctctgagagaacccctgagagcttgagaccagagccgaaggaggctgtattgggacgatctgccttagggaaagtgattccctggtgtttctgaatatcccagaggtaagaaactctagctctaactgttggttctgtgtattggatttcggggttttggggttatcttgaggggtgtttttggagatgttagagccgttattaggctcggactctgtagagtcttatgctcagagcactgttctgaggagtttagagccttgaatcatcattattgatgaagtttgattttggctctgagtcagtctgagcagagataaaaggttgactagttgactagtctgggccttagagcagttggcaaagttgctcctgaggttatatagatgatggttgtcagttgaaactgatgatactgagaagttgagttcaggctgttttaagcaggattatgcttgatgttagcctaatcagagtctttgtggtgactctatagccttgtagaggctgagagggatcctgttgaggatcagatgatcacttgtacagtgattagttatgtttatagaaaggatgatagttccctttcgtttgaacggtctagaaccgtatctgatactatatacgcttgttcttgtgtaggacgtgagcgtgagagctccggtggtgttgaccacgagatcgggagagccggtgatctgtctagagcaggtaagctcttggttcctgttggtgtatcctctgttgtgttccaccatatacccagtggggttatggttctgatgtatgtataaactagtagaggaatgtgtataataccgtgaatgattggtagatgtggtctgaaccctatgaaagggtaattgatgcttgacatttgatctgaacccagagatgggtaattattatataggaccatgagttattgattaatgattgatgtgtttgattcctgagaaaggaaactgatgtgtacttgaccctaagaaagggaagtgatgtgtgattgaccctaagaaagggaaatcaatgaatatagttatgattcattgatagcatgccttattgtttatgagacttgaatatgcctgtatgtagatgctgtgtgctgatgttctgatccctatgagagggagattgacatgtattgatatgctatgcctgaaatgtgaactgaaccctgtgatagggaattgatatgcatggcttggttgtgattgaattgtggtaggtctgggtgaatgtgaaacctgactatgcatgctatatttgaatagtatcctatggtagtaggatagatgacttgagaatgagtaagacctggtgtaagatgagcctgtgatatggaggcagcctcctacgtggagatgatcccatatacacagatgtagccttcccaggcaattgtattgtgttagaggatgagatggccctgtgctacatagaggaacctcttgagaagagatatgcctatgttcacagaggtagcctcaccaaaaggagatgtaccggatatatagatgagcctcgtgagagagggatgtacctatatgtctagatgaagcctccgctagggattcatgcaagagatgtgccgagtatatagatgcagcctccctgtgaggagatgatcctatatacttagatgtagcctctgcatgatggttattgatgtgataaatgactttatgtcatgattatgccttggttttggctgatgacgtgtataacctgattgtggtcaggtgtattgtgcattgacgtgcttgatgattgatttaatgtttcactgatgatgaatgtgtatgagctgagtccttgataggggacaattctttgagatgatgtacatggattgagtgattcgttgatatggatactcatgctatgattgtgtggtgatgtattgtgagtgtgtggtgcatgaatacaagccatgagcttgttctgattttcattgctagaggaatatatatattgactgtatatgtattgattatttgtgtttgatatctatatatatgtatgtgttgtcagtgaaccaggggaaggaaataccttcaagggccctgagtttactaagattttatatctcacccagtttgtgggacttatgatgcaggtgaatcctcgagagtagcagatagatcccaaggcaagaggcctatgcaggattagatgctgctggacaccttaggatagaggatatgagcttaggctctgatgctttgtgcttagccttgtattttattttgatgtaccctgagggggagttatttgtactgtgtacagttttgtattgtacagaggaaccttatatgtatattcaccatattatagtgtacagtgttatacagatgacatttgatgatgtcacttttagtatatgcttccaaactgcttaatctctgattgattatctgtctgattgtggtgtatgtttggtaatgactctgattagaaattggggcgttacaattgaacattattcatatatgttttattatttttcatcattatctttctttgttctttgttattagtttgttataatgagtggaagtggatccaattcaattggtggagatacaattcaccaaggagtaaagtaaaacagattaaggagcatcaatccaattcaccaacccaagctattcgaatcatcatcattctcataagttgattctatcatgaacattcattcaatttcaatagaagcagttcaatcgattgtactcctaaattaattgaaaccacaatcctaactgaactatcattcaattaatcttgtgattatcatttgaaattaggacatgaatccataatcctaactcactttcaatcctaaatgcattcataatcatgaaaacataatagaaattgaagaaggtgaatattcaagtagaattcaaaataccgaaccgaaactccaatttttctcttgcttgagttagatccttggattgattaatgatttagccttccatgatgataaccaaggaaatccccatgaagtaagtgcataaaaatggaagaatagcaaaatgaaaatgaagaagatgaagaacaaatgagagaaaatgaagaacaagcttttgattctaaaaactaaagaaaagaaatataaaacttgtttattgaattgtgaagtgctgtccaagtttcactaaagtcactaatacatatagtgactaagttctgaaagtagaatgtgccataaacaaacccaacaatctaattatttactatttacaccactaaaagttcaattcacagtccaaaattacaagtgtagaggtgctaacttcaaagcataaaatgaccctccaaatgacaggattggcctcgggctatttctagaaaaattgtagatctttttgttatctttccagggactcctagaatgctccattcggagatcggtagcactctataggccctgcacaagtcagatacgttaagtgagcaaaaatccgaaaatacgctataattagcaattatgcccacttacttgcctaagacaaaaactgaattagaataggaaaataaaggtccaagagaggtcaaataagctaagaaggatagaaaaatatttaactaaaaacactccatcactcatgcatactagtcgtttttaaaacataaagcatacataaaacagattttatatgagatagtcatggtgctcgtgcattctttcttcttgcttcttaggtcgcggctccatcatgaaatcttccatgcctaaacaccactagcctaatttttctaattacaaaataattaaagaaactccaatacatctttggagaaacaaaagaatatacaaaatttaaaactcaaaattacagctccaatttaaactaaaacaaaatttgaattcaaatttaaaatatttgaattcaaatatttaaattcaaaatttaaatttaggcaccatgaccatctccttccatatctgcactttaaaagttagacaactaacaagcacacaatattattatctctcaaatggccgaaatatgcatccaaatacataatttaaattttgttgattctttctcaaagaacacaaaaattaaaccatacaatcaacaatttatatacatagacttgtatgagaaattttgtcacaaaaatattatgtcatgctcatgaacaattcattataacaaaaacacaaaaataacaagatcaaaagtgaacaaaattaataaccctaattttattcatgtgaccacgacatgcataggatatttcatgcattttgaaaacaaaattatggagaaaacaatatattcgaatattcatatcatggctgaatcatattcctttcttaaaagatgtttctttgaaatctttcacaaagaatcataaagaaacaaaaccatgaacacataaagatatatgtaaagcgtaatcatattacaaacaacatattataacaaacaaggtatcatcacccgtcgatagtaaaccaaccaggctctgataccacttgaaagatagggtcttaaagcccgaaggcatgtgagaagaaaaacaaaattttttcaaagcggaagcacacataccattcaagaatcattctttaggacatagatgttacctcatttgtattcgaaacttgatgatcaaggataggcttgaagatacaagccctctaatgttgatccacgccacttcttgtcaagactcaagaacacttcttgtaggcctccaacaaacaccaatggaggcaggctaggcatgccaatggagaggaagaaggttaggtttcaaagtgtttttacttatctaagagactcaccaatagatgatattggtggctgaattttcagccaaaactcaatcaaaggggcacgttgaaagggaggaagatggatagggtttttctcaaaaaaccactattagagaactatgatcacaagagtttatttatagaagagttttaggtcagatttttaaccataaaattctgatcattaagcatctcacacatgaagaaaagatagagttgttgtatttcaaaaattgccaacaacctcctatcttatcttcttaagaccaagtcaattacttggaatttattttgccaaataataatcaaatatccagccgtatgataagcctctaatcaaccctcaaacttcttcctaaaatctaggatatgatcatgataagatgctggttgaattcaaattcaaatctagctcttatcttctctttttgatatgaaactatctactatagttaattcatatttaaattcaaaatttaaactatcaaatttaaatattagataattaatttaactatttaaattaattaataatgtcttggactatccaagcccattaactccattcatgcgcccctatctctttaagataagtttctaaactctttcttgggccaacaaccattattaggcccaaaacctttaatgctataatgtcatgtataatgaccctgagtcctagtgcggacgacgcaagtttctgcgcggatagcccagggtttctgcagaattcttctacagaaaccagttgtagagatgtggcgcgatcggtgccagtgtggcccgatcagcgccatactctctggtttgtggcgtgagtggcgccaagatggcgcaagtggcgccatacccctagagggtggcgcgagtggcaccgtggtggcgcgagtagtgccacaggttctgaaggttgacgctggtagcgctagagtggcgctggtggcatgagaaagctctggagacctgtccatccctgatggttggcgctgttggcgcgggagtggcgcggttggcgccatagttcttggaggttggtgcaagggtggcgcggttggcgccatggtttttgggagctggcgcgatcagcgcgactgttgggcgatttatgctaatgtatatacggcaagtgcaccgatcgtttaacaagtaataaagtgtaagtaaagtatcgtctccacagggattggaaagattccacaataattataaagattatgattgaacaagaaacagaaaagtacgcaaaagtagttggatgattgtgttgaattgagaatgaaaattaaacaaaacagtaaaattaaaatcgagaaattaccaatgaaaaataattgtggtcaggcacaatcccttataagcattacctccttcaattgactgaatattctaacttgaagtttacataagataaatctctcctatattcgtaaatcctagaactactagagtcataaccagcgatttaaccctttaattcgatcgagaaccctaaccttctagcgattctgtcaaactaataattcagagaacaaatcttatgggttcgtgttatgtttactcggagaataagtcttttctattttagttaatccctaatgtcttagtgaaactagtcagttcaagcaattaaagaacatattataacctccgcactcatgcatccctatgtctaggtgaagaacaagtgttaatcttaacaggtcagatattataattccaacgtgtccattgcgaagtataactctcaatactcattcagagtgatcaattctaaacaagattataattaagcacagaaaagaattaaaataaacaaaacatatgcatttaataccagtcaatttacagagggaaactcataagttcatggcctttccacaacaagatgattagctagccataggattcaagaacaccaaagcaattggatgaaacatgattctgcagagctttgattccaatcttgattcctagggtttgccttcactaaaactctctattctgtgtgtaattctgtccaagtgagtctatctcaggctagatgtatctaacaatacagaaaactctcctatatattgagtatttttaattacagtaacaaagcaaaaaccctctcctaatttcgaaacatatatcttcttaattcaggaaagaaatcataaccacgcgactcgcgcgcgatgccacgcgagtcgcgtggactggcagaaaggattggcgcgtgtcgcgtggaacctgaagtgcttcgcgtgaagggtcagtgaagaattgcttatttctttgagtaccgacgcgactcgcgcggattaccaagtgtgtcgcgtggaaggtcagagctgaaatggcttaaacctggaagttctcacgcgactcacttgaataatggcgcgacccgcgtgatcttctctggtcttccaagtggatcgcgtgaattgtggcatgacccgcttgatgctccagatcttgtttcctttgttatttgcctgtaaatccctctttttgacctgcaaacgcttaaatggtattaagctgctttatataatctaaaatactaaacatggttaaatttagaactatttcctaactatttaataacaatatgacctaaaactaatctataattaagatgtgtttgcaacacatcaaacaattcccagatttgaaagttgctgtcctcagcaatagaaagaattctaagacataagcaagaatcaataatcaacaaaaaccacaattcacaatcataaaatcatcatgaatgtatgatctactcagttaaatcctccatgatgctttcattgctgtcaaaataagaactacttgagtttttctcacagatgtgtctataatcactcattcactcaagtgtttcaggctgtaattaacctcttactcaacatgattatagcattaccataggcttgaagatattctcattagttgcaagcatgacttgatcagaaggtcttttaaggcttgtaacgtggcttggctaagggtatgaattatttgggaaaagtagctcaatcagaggctaagtctggttccctaagtccaagcgtattgtggtcttccgagcttcttgtcttctctggttcaaactggtacttttattcaatctcttttattctaagcataaaataacataatactactttctttttgctttttcaatttttcttatcaactattttgtaatcagaacatactaaattattgcagcttttcacatttttcagctgatgaattccagctttttcttcttattcatttgatttctcttcttgtccttcattccttggtcaatagcacttttctgtcatggacttagttcaccttcttaagcctcaaaaggtttcagtcatttggacatggcttgatttgggttactgaaatgaaaggtctaagctcaaaattcaggttcaaaggaaaattttacttgggtaagtcaatttggccctagttttcagaacaaatcatgccttaatcatttcaagtcacacctgcacttagagaaacaagtcaagttctagaataccataaagcatggagtctctcaaaagaaaatttaccgaatttggcccaaaatcttacaggtgttgtgactcaagtcattctcaatcaactgcatatctggcatcatttcaacattcaacatgagtttcacatactatcaatcaaattctactcatgcattatgcagtccatgtctcttatttcatccaacttaattcagagaaatccgtctattattaagttcattcgctttcttaatctgaaaaagttttgtgtgctgcttatttttaagaaaatgtttgaaaaattctgattatataaaaattttaaagtttctgttagacttcctttgattcttgattgtgatttgcgaaataatgcgtaaccattcccagatttatatgttgttgtccccagcaaccacaaacatggtcatagcgctttggaaaatattaagcattatttggaaaatcgcattcaattcacattcgtcaaaacagatttgattagaaaaattataacccataaactgtactatatatataatgcagtaatatcaaagtatcagtaatagaaatgtaaatgaaatgtaaatgtgtagaatataaaatgtatgtaatgcataataataataaaaataatccaaaaacataagtctgaaactaaaaatatgataaatcctgatcactcggctgcatctcgatcctgtgtggtctcctcagctgcagtctgctgagtcaaaggctgagtgatcgctgtgtccgcatccgatgtctggtctatcggatcggtgtggtcgacaactggctgaggtggctgtggtgcaaatgctggagctgtagtctggtactctgaagggtcaatgcctaaatgctggcatacagctccccacatgcgtgtctgcaatgccaactgcgcactctgaaactccagctgagtcctcataaactgctggaaatcaagtaaactcggagagtcctcgtagagtggagtgcgtgtgggtacggtagatggtggtggcatagaagtaggtggtggtgatgatggtgctgtctgtgggatgggtgagactggtggtgtaggatctggctggtcatgctgggggtcatcaaccggaaggtctcgaggagaagcagcggcaattgcctcaggtgtgagctttgaagctctgactacctgctcgtctgctgcagcgctcatggcagtagtataggtcttatagaccataagtggtgctatcgggacgtccatgtcctcgtcctcgtcaatgggtacccccgcgtgccgacaaagaaggaggatgagcgaagaatgtccaatccaggatctgctgccgacgtcctgggtcatctgcaggatcctatcagataaaactgatgaaatgagaaggttacctgccccacgtaggatttataggagaatggcgcactctacgttcacatcggttatgtttctcgatggcataatcgtgtggttcacgaacagatgccaaaaagctgcatctcctaccaacttagacttctttaatttctctggtatgtagtcaaggctgggcttggtctgccaagctgtgtatagacttgtgatagcgcggcggatggtggtagcaagctccgggacgtcatcattatacatcttggttacggcgtccggctgcatatgccaaaataacctgatgaaatcgcatgccgagtaggggtcatagtcagtgtcaagcaggctctcaatagtcttctctccaaaagggactgtaactcctctaacccaagagctcctagtgcggtatacggtgtcatgatccacgttggacaaaaactccttcaggatcatgctggagctgggctctgggaaggtcacgagtctcggccactttcggcggatgatgacctgtttgatggggttgtcctcagggaattcttcccacataatcttccgctctctgatgattttcttgggtaggtaccaagaatcaaacttttcttggcactcgatggtgcggaagcgtagctcatcaaagtctgccactcgggctctcttcttgttgctctccccggtagttttcttctttcccttttttactgctttagcctgttctacctgtttgccctgaaattcataaaagtccaagtaatatatatatattttaaacaattgggaattcccagatttatttcctttggtgaaagtgactaagtaagcaacaggaaaccaagtgtgtaatccccattcacaggttattgtcaaccccattcaatacataatcaaataatccaatttctagctcaacagctcaatgataactacacttacatcaactcatatctgtgtcattcagtttcaatttcattccagacaacaattcccagattttatacttttggtggtcttagcaatgtcatctaatcccttttattaaacaggtataatcatattgacctctctgtacaattccagcttatgacatccacctatcagcatatctgcttagtcttttcataagatcaataactcagtggactcaagtcaccaaaactgaaatcctagcatatttaattgttttattattttaatcataccagtgaataatccagttttgaataaatttatcccattcccagatttaggtttttgctatggtgacttaagttggttaagacgtcttggattagtgatttaacaatatttcattattaccttgaagccaatatagtgtaagtacttaatacacactagtgatcattctagtcttatacccctcgtattatggtgagtacaattcatagcaatcatgtacttggagtatcaattcacatatcatcaagccttatgcaacaatttatattgaactttatgcgcaaacataatatcagacttatgtagacatcaatctgcacattaagaatcttcacagttcatcaatttcaacttagccattaacaatttttattcataattcaatgcacacatatcattccagtttcattttaattttcatcatgtatgcacccacatccaaattgctccaaatgtatactacaataaccacattcgagtaaacatgatttcaagttttcatttcaaagttcccttctgtaatgtggaatcattttgaagtttaagtgtctctattattagagacttaactcattcccaatcatcctcggacttatgactttccaataatcacctagcatatgataatcacaattgtaaaccaaactgggtattaatttgtattcacatcagtcattcttcttgattcaaatcttatgcctaaggagttcatttcggtgcctattgcattcaaattctcattcagacattttatcaaacatgtggtgtgcataaaattgaatgtggttgatatgtgtgttgggggtatggcaaaatccaaaatttttcttaattaatcagaccacagacaagaagagaggagaaggagaaaatcatttatatcaaaatcgaaaatgtggctaccctaaggtgttccagagtttaggcttaccttgtccttggccattgtctaatttgaattggtaaatgcaatgaagatgatgctgcacgaacagaacgaatgcaggagatatgagacaatgtgggtttataaagagtgaggggtattgagagggagttatggattgagaggagtttagggaggttgaggaagttgggggagttgatttggggagagtgggattaaagggcgcgatttttgggattctattttaaaaaacggttcccgcgcactcacgcgacacgcgccactaatgaagtgggtcgcgccatactccagtaaagaattggctgtttcaagtgagtcgcgtggatctcacgcgactcgcgtgagatcgggctttttgattctggaccttcacgcgagtcacttcataatccacgcatgtcgcgtggattgccctgggatgtctgttgagtttctatatgtgacgcgagtcgcgtcatttaccacgtgggtcacgtgaaatagtgcttttaagcactgccatatggcgcggaatgcgtgatttccacgtaggtcgcgtgaatttatacagacaataaatgatgttggttgcagatgacgcgattcacttggtttccacgcgagtcgcatgaatggacagtatgtatggcgcgatgtgcgtgggtttccacgcgtgtcgcgtgacttccttttctgattacctttatattttctcctgctcttcaatcctctaacctaatgactaaaattacttaactactcctaaatgaattaactaaaataattctattacttatttaagcaaaattgaaatgaacttaaaattggttatgatgcatgaacttaaaattgcatgaataaattgcatgaattgaaatctactactatcaactgaaattaagcttatatacagaattcagtgcttgtttaacgtccttaagctagacctttacggcaattcattcagtgttagcttggagtggtacagaacttgaattcctgtccactttacctccaaagtaatgttttagcctatatccatttaccttaaataccttatcactatccaaggctgaaattgctactgtgccataaggaaaaacttctcttaccagaaatggtccaaaccatcttgacttcaatttacccggaaaaagtttcagtcgggagttatagagcagcacttgttggcccggaacaaattccttatgtttgatgtgtttgtcatgccactttttcgttttctctttataaatacgggtattctcataagccttcaacctgaactcatctaattcattcaactgtaacaaccgcttttcattagcttgggttagttcaaaatttaaaaatttagttgcccacaaagctttatgttcaagttcaagtggtagatgacaagacttaccatagagaagttgaaagggagacataccaattggagtcttaaatgcagttctgtacgcccacaaggcatcgtccaacttcttggaccagtccttccttgatgttccaacggttttctctaatattcgcttcagctccctgttagaaatttcaacttgaccactagtttgagggtggtatggggttgctaccttgtgttttactccatatttagctaacaagctttcaaggtgcttgttgcagaaatgcgttcctccatcacttattatggctcttggtacaccaaatcttgtaaaaatatactttcttagaaagtttatcaccaccttagcatcatttgtggttaatgcagttgcttcaacccacttagacacatagtccacaacaactagtatatattggttaccaaatgacttaggaaatggtcccatgaagtcaataccctatacatcaaatagttctacttcttgtatgttatttaagggcatctcatctctgcgagaaacattcccagttcgttgacaattatcacattgctgcacaaagtcctttgcatccttaaatatggttggccaatagtagccacattgtaagatcttttgtgccgtacggttaacaccaaaatgtcctctgtagttggatgaatggcagtgccaaagaatattcggcacttcactttcagctacacacctacggataatattgtcagcacaattaaagtataaataaggattatcccacagatacctcttagagtcaatcaaaaacttctttctctgctgccacgtgaatatttcagggatgattttagcagctttatagtttgccatttcagcaaaccatggagtaactccaacagcaaatattttttcatccgggaaaacttcatttatttccacttctggtccatcttgtagctccttatgctgaattctagataggtgatctgcaaccttgttttctactccagctttatctctaatttccagatcaaattcctgcaagagtaacatccatcgcaacaaacgaggctttgcatcttgtttatgcagtaagaatttaagagctgcatggtcagtgtaaataattactttagaccctactaaataagatctaaacttatctaaagcataaactacagctagcatttctttttcagtggttgcatagttaatttgtgcttcattaagaactttactagcatagtaaatgacatgcaatttcttttcttttctttgtcctaaaacagcacctactgcataatcactagcatcacacattagttcaaaaggtaaactccaatccggagctgttataactggtgcagtggtaagtttttgttttaaaacgttaaatgcactaagacatgcatcattaaacacaaattctgcatctttttccagcaattgactgagcggttttgcaatttttgagaagtccttgatgaatcgacgataaaatcctgcatggccaagaaaactacgaacaccattcacgttaatagggggatgcaatttctcaatgagtaaaagtttagctctatctacatctaatcccatttcagaaattttgtgtccaagtactataccttctctaaccataaaatggcatttttcccagtttaagactaaattagtttcttggcatctttttaatacttttgctaaattagttaaacatgtattaaaacaaggcccaaaaacagagaagtcatccataaatacctctaggcctctttctaccatgtctgaaaaaatagaaagcatgcacctttggaaagttgcgggtgcattgcacaacccgaatggcatccttctataggcgaataccccgaatggacaggtaaatgcggtcttttcttgatcttccggtgcaactggaatttggttatatccagaataaccgtcaaggaaacagtagtaatcatgaccggctaaacgttcaagcatttggtccatgaatggaagtggaaaatggtctttgcgagttgcttcattaagccttcggtaatctacacacattctccaacccgtgatcgtccttgatggaatcaattcattcttttcattttgtatcacggtcattcctcctttcttcggaacaacttggactggacttacccatggtgtatcagaaattggataaatcatacctgcatccaaaagcttgacaacttcctttcttaccacttctttcattacaggattaagccttctttggggctgtctcacaggttttacgtcagtgtccattaaaattttatgagtacaaaaggaagggtttatacctttaaggtctgaaatagaccaaccaatagcggacttgtgttctttaagcactttaatcaatttgacttcttcatgccaatccagccctttgttaattattactggataagtttcatgatctccaaggaagacatacttcaaatgttttggcaactctttaagctcaactttgggtgcaccggaaaggatgtcatcttctttgacttccagctcttctatttttggttctgctggtgtttctgcgttattagaattggttgctgcagctttttcttccacttcataggtggtttcaaggtcctcctttgcagaattttctgcataaaatccagcagccgtgtctgtaaatttctgcaactgttcttgtgcttttgttggtgatttttctgcatgttccgcatgtgcagtgctggctgcgtcttgtgttgaatctttcttattaagtgctacaacacttgcttcaaaacctgcacagattacatcatccagtacatctatacgaaaacagtcattttcatcattaggatgtttcattgcatcaaatacactaaaaaccacagactcattatccaatcgtaactctaatttgccttgctcaacatctatcaaggctctagcagtggctaggaaagatcttcttaaaagtaggggaatttcactttccccttccatgtcaagcacaatgaaatccgcaggaaatataaacttatctacctttactagaacatcttctattaccccggagggtgtccttaatgacctatcagctaattgcagagacactctagttggtttaagttcagtctagggacttacacatagataatggcatcagatttatactagctcctaagtcacataatgctttacctacatcaatattaccgatagctataggaatattaaaactccctgggtctctcaacttaggaggaagcttcctttgaatgattgcgctacattcctccgtgagtgctattgtttcacattccttcagctttttcttgttggataggagttccttcatgaattttgcatagtttggcatgttagctaatgcctctgcgaacggtatgttgatatacaacttcttgaacatctccaaaaatcttaaaaactgtcacttttgctcttgttgcttggtcaatataggatatgggggtttttcgaaacgcgaaaaatcccacttctttggtggaggcataggatctttctcctccaatttttctgcaactttttccttatctttttcagttgctgcagaattttgctccacctcttgaatacttgattcaggcttctccggagttactaatactttaccgcttctggttgtgatggctttagcatgttctcttgggttcacaaccgtatcacttggaaattgaccttgtgacctttcagccatttgttttgcaagttggccaatttggttctccaagtttctgatagaagcatcttgattggtccggtgagcccttgtttcagcaataaactctgtggtggttttagtcaactgcatcaccactttttccagctccgaaggttctttgtttggaataggagggggttgcaagtagttattggacttataatccaaaccacctccttgaaatcttcgttgatagttatttccagctgcataattattgttcctttggtatggttgctgctggaacggttgttgttgctgcctttgatcattccaaacaccatttacctgcacagggtcagcaccaactaaaataggacaagtgttagactcatgctcaccttggcaatactcacacacaatatatggtttgcttgtgcccacttgtgctgcagaaacttgcaatcggtccagcttctcatttaatttggctaattgctgtgctaaaagcttttgttctgcaagcattgcatcattagcatttaactgaataggctccctctttgactgaagtgtatggctttcattctcagttcttgccaaagatttgattaactcatatgtttgtgcggcggttttggatcttatagtaccaccggctgcaacgtttaccatcattcttgtctcaggagtcatgccattgaaaaatattctaacttgtttacctacaggcatatcatattgagggcatctccttaccaatgcctggaatctcttccatgcagtgcatagagtttctcttccactttgcgtgaagttggtgatctcgttcaccaatctatttgatgtgttgcaaacacatcttgtttttagtctagttttaggttagaatttgattaaatacttaggtaaatagcttagaattagttgagtttagtattttattgtttaaatctaaattcaataccaattgtgcaatttcaggtcaaaagaggagaataaataataaaagaagcaagttctggaatgtcacgcgtgtcgcgccattactcgcgcgagtcgcgtagaagacccgaggatatcacgtaggtagcgccgttattcaagtggatcgcgtgggaacttcaagatttaagtcattttcaactctgccacttcacgcgacatacttggttatcacgcgggtcgcgtcaagattcaaagaaataaggaatttccttctgtcacttcacgcgaagcacttcacaacccacgcgacacgcgtcatttctttctgccagtccacgcgactcgcgtggtatcgcgcgcgggtcgcgtgaggttaaaacagtttccttatttaaatcatatatttcaagatttggtattatattagattagttgccttaattaagtgattctataaatatatttagtttccttaattaagaagatttgatttagatttggaacagaaaataggccttgttaccttaattagatctatctataaataaaggcctctgggggggttcaagacatctcttaacatacactgacacctctctactcttcctttcttttctctaaacctttggaggtcaagaatcaaggcaaggtcaccaagaatgtattatttgacagcctttggtttcttgaagcttatggcaagctgaacttgtattgtgggaaggccatgaactgatgtaactcctttgtaacttgaattggtattgattctaatgctgttttgattattttattctactctgtgctatttaatgttttattcttatttggaattggccattctatttaagtattgagggttagaattcgcaatggacacgttggggttctaatttctgacctgtttagaataatagttgctcttcgcctagacatagggatgcgtggctacggattttataatatgatctttttcatgcttaacttaatagaattcaccaaggaattgggtttttgaattaggttaaagggttgattcactaagacattagggattaactaacttaggaaaggcttatcctccgaataatcttaacaagatcacatgagatatattctttgaatacttagtttgacagattcactaagggtttaggtttctcgatcgaattaaagggttaaatcgctggttatgactctagtagttctaggatttacgaatttaggaaagatttatcacgtgtgtgacttaagataataaactaatcaagtgaaggaggtaggaacaaaagggattgtgcctggccacaattgtttcttccattggtaacttctttatctttttactacatttattttctatttttattcaaacaatcaattcacaacaattatctctttactttctgtttttattccaatcgcttagaattaattttattgtaaaaattaccccaatccctgtggagacgataactcacttacctactttattacttgttaatgatcggtgcacttgccgtatattcattcgcataaatcgcacaacactattgtacttatccatagagaaatactctgcaaagaatcttgaaactaagtcgtcccaagttgctatactgttagatgtctggcaattcagccacctcaaagcattgtctttcacagcaaacgggaataaacttagcctcacagcatcatcggagactccttggtgtctaatagtgtcacagattctaaggaacctgtctatgaagtcatgagggtcttccgaatcatctcctccaaactgactgcgctccaccaatgatatcaatgaagggtttatatcaaaatgattggcttggattggtggcctcacaatactagagtttggtcttgtgaacataggagccagaatatcctccataagttcatcttcaggccgtagccttggtgggggctgattgtgtagttcttcagccatctcttccgactcaaattctggaagtgaatcaaagtcgaacagttccgcttctctccttctttgtctagctagcctccttcggagtgttctctcaatttcaggatcgaattccaattcctcagagctagctgaacttcgcataaaaaaaaaaactaagagaagtggttagtagcaaaagttcaatcacaaaatttaacaattactgaaaaatctgttaccaatccccggcaacggcgccaaaaacttgttgggcgatttatgctaatgtatatacggcaagtgcaccgatcgtttaacaagtaataaagtgtaagtaaagtatcgtctccacagggattggaaagattccacaataattataaagattatgattgaacaagaaacagaaaagtacgcaaaagtagttggatgattgtgttgaattgagaatgaaaattaaacaaaacagtaaaattaaaatcgagaaattaccaatgaaaaataattgtggtcaggcacaatcccttataagcattacctccttcaattgactgaatattctaacttgaagtttacataagataaatctctcctatattcgtaaatcctagaactactagagtcataaccagcgatttaaccctttaattcgatcgagaaccctaaccttctagcgattctgtcaaactaataattcagagaacaaatcttatgggttcgtgttatgtttactcgaagaataagtcttttctattttagttaatccctaatgtcttagtgaaactagtcagttcaagcaattaaagaacatattataacctccgcactcatgcatccctatgtctaggtgaagaacaagtgttaatcttaacaggtcagatattataattccaacgtgtccattgcgaagtataactctcaatactcattcagagtgatcaattctaaacaagattataattaagcacagaaaagaattaaaataaacaaaacatatgcatttaataccagtcaatttacagagggaaactcataagttcatggcctttccacaacaagatgattagctagccataggattcaagaacaccaaagcaattggatgaaacatgattctgcagaactttgattccaatcttgattcctagggtttgccttcactaaaactctttattctgtgtgtaattctgtccaagtgagtctatctcaggctagatgtatctaacaatacagaaaactctcctatatattgagtatttttaattacagtaacaaagcaaaaaccctctcctaatttcgaaacatatatcttcttaattcaggaaagaaatcataaccacgcgactcgcgcgcgatgccacgcgagtcacgtggactggcagaaaggattggcgcgtgtcgcgtggaacctgaagtgcttcgcgtgaagggtcagtgaagaattgcttatttctttgagtaccgacgcgactcgcgcggattaccaagtgtgtcgcgtggaaggtcagagctgaaatggcttaagcctggaagttctcacgcgactcacttgaataatggcgcgactcgcgtgatcttctctggtcttccaagtggatcgcgtgaattgtggcgcgacccgcgtgatgctccagatcttgtttcctttgttatttgcctgtaaatccctctttttgacctgcaaacgcttaaatggtattaaactgctttatataatctaaaatactaaacatggttaaatttagaactatttcctaactatttaataacaatatgacctaaaactaatctataattaagatgtgtttgcaacacatcagcgacagctctgacaagaccactataaaagggctgggtcgcgattttggaagagaaaaccttgtttcttcttcctctgagcgacctgcagccattgttgaagctccaagcttcattccttcaccttagttcaccaaatcacttcctttgaacctcaatcttgttggaaaacacttggtgagcttgaatccttcggcgaggaacggcggcgattcatggataccagagcttgggggagtcgtcctttggccttccttgtcgtcattgaggtaagaaactcgagattaaccgcttgatttgtgtattggggttttgggtgaatagtgatccacttgtgatagagctagtattagccttgggtcctttagaaacatgtgtttagaatgttgtgaggatgaaggattagctctcaaatgttagtttggtgaactttgatttcttggctctatgtgatgcatgcatattagtaggttgagttgcttggctatgttgtgacatgcgagagccttgttttatggctttgttgtgcttgagaggttgttggaacggtgtcttgtgtgtgtgaagaaccattcaagccataatgaggattcttgagctatggcctgtatagagcttagagctctttgtgttggattttaccgagtcttgtgaatactctagtactttggctaggccaagttagaccactgagggtctatacgttgtaaatgatttgatgagcctgataaaccttaagttagaggacttagtggttttggaaaggactgaggtacctttctttgagacggttgagaatcgtgctatatgcttgtgcttatttgattgcttgatgttgatatgagcttgtatgccttgtttagggcgtgacaccgagggtgtcagtggagtaggccatggagcagggaaagaactacagagctcgactttgccaggtaagttcttggtcccttggggatgtttcccactgcttgtgctccaccatactccgagggagtgatggttgcattcatgatgcatgcattaatggttgttgcattactcataatgatatgtatgctgcatctgtgcttgaacatgtatgatgcctgttgatagatcttctggccaattagatagatatggacctctataggagaaaagcacacatcctagtttggtttgctcatggttgatgagatcctagggtgatgatgatcccttaagaccaagagataggtgtgtcccgtcgtggttgattgcctattctcagaggtaccatatacgtgcgtccatgcgtaaggggtagctcccgatgggatggcacggatgtgagttccggtctcacactgaggtttggtgttgatgagatccaccttacattagagctagatgacttgcttgtattgttatgagggccgggagaccggtatgtttgtgatgcctgatgacttgtgtcatggaaagtgagccagggtggaggagatgcctcctgtgatgaccctgagacctggcgcgggaggcgcgaggcgtcgcgcagttagcgccaggtcctttctgtagaaaaccctgtacagggtgtggcactgatggcaccagactctctggaatgtggcgcctggggtgccaggctcgcgctgagagcgcaagattctctggaagttcacgcctggagcgccagagttggcgctggggggcgccaactaggttaggattgtggcgctgatggcgtggtgttggcgctgatggcgccagaggttctggcaagtggcgctggaggtgcggggatggcactgagggtgccagacccaccaccatgctggcgcgggtagcgccaggtctagcgcggatcgtgccagacctcggatatatatatgtatgtatgtgatagtgtcttcatttgtgttatggagagtaccacgcttcacggaagcggtggttggtgagacaacagatatggacctccctaggagagggttttcctcctagttggtttactctggttgatgatatcctaggggatcggtgatcctccaggtcaaggggatagaagtcgagggttctccttctatacctcggaggtgccataggtgtgtgtccatgcgtaagggatagtttatgatgggacgacacatatgtgagctcagatctcacactgaggttggcgttgatcatatccgccaggcgttgatgagatccgctatgtgtacagagcaagatgcttgctcatgttgtatgagggccaggtggccagtatgcttgagatgcgtcctagcagaggcttggacatgtgttaagatcttgagcatgatagcgtgggagtgttccatgcctgatgacaatctttaactatgagttaagtgagcaggtcagagatgtgtacctgtcgatgacagaggatcatctggtctctagtggagagggaccaagtttgttgatgatcagagtagcgcagtggaatatttgagaagcccagccgtaggatgtggctgtgagggctatgctagaccagcgggacgtctctttagtaggcacatggcttatgatgagctaagccttgttgtagtgccaagagagagctggtggacgtcgtccttattgagattcataaggattggttggttggtcatccaagggccactatgatgtgtttgtatcctgataggattttcggtggccagggatgaggagagacatagctgtggatatggctagtgtctggcatgtcacatggttggtgacagagatctgaagctacctcttagtgagaggtgctcttcggaaggtttggaacccagctgaggcttagtgtagcctaccatcctcggattgatgatcagatggagcgagtcatccaaatcctggaggatgtgctgtgagtgagggtacctttgagcagggtactagctaggttagatgcctgcctagagtggagttccttgttggtgatgggttcaagttggtagtgacttgacaaccatgagacccggtgaggccattggcacaggactccagaggttgggcagatgtgagaagaagaaacagcttcttgaacctgagatggttcagaggactcttgagcagattcggaggatcagtgttagttttgaaagctcagagtcggtggaaagaatatgtgacctagacacagaatcccttacagtggataagggtgatcagagatgtctgatgttgtctccggtcacaggtgtaggatgggctttgaggatggggaggttggctcccagttgctagggactacatgagggtttgccatgtgtcccggttgagttgaatgtgattgattcatcacatatggaaaagcccggcagtgatcagattagagagaatctgataagtcctacacgacctttgaggagaagcagtgtaacgccccaattttctaatcagggtcattaccaaacacacatcccaatcaaacagataatcaatcagagtttaagcagtttggaagcaactactaatagtgacatcatcaaatgtcatatgtataacactgtacactataatatggtgaatatacatataaggttcctctgtacaatacaaaactgtacacagtacaaataactccccctcagggtacatcaaaacaaaatcaaagcaaaatacaaaacatctgagccacatgctcatatcctctatcctaaggtatccaccagcagctaatcctgcataggcttcttgccttgggatctctctgctactctggaagaatcacctgcaaacatagccccacacaaggggtgagatataaaatctcagtaaactcagggcccttgaaggtattcccttcccctgtttcactgacaacacacacatatatatatatttatcaaccataatcatcatcattagcatcagtcacaaataatcaatacatatacagtcaatatgtatatatctatctatcaatgaaaaccagaacaagctcaggcttgtattcatgcacccacactcacaataacactatcagtgaaacattaaatcaatcatcaagcacatcaatgcacaatacacctgaccacaatcaggttatacaagtcatcagccaaaaccaaggcataaacatgacataaggtcatttatcacatcaataatcatcatgcagaggctacatctaagtatataaggccatctccttacggggaggctacctcgatatactcggcacatcacttgcatgaatccctagcggaggcttcatctagatatataggtacatctctgatcacgaggcatcaactatatatccggtacatctccttttggtgaggctacctctgtgtacataggcacatctctgatcacgaggctcctctatgtatcacgggccatctcatcgtctatcacaatacaattgcctgggaaggctacatctgtgtatatgggatcatctccacgtaggaggctgcctccatatcacaggctcatcttacaccaggtcttacttaatctcaagtcatctatcctactacaataggatactattcaatcatagcatgcatagtcaggtttcacattcacccagacctaccacaattcaatcacaaccaagccatgcatatcaatcccctatcacagggttcagttcacatttcaagcatggcatatcaatacatgtcaatttccctctcatagggatcagcacacagcatctacgtacaggcatattcaagtctcataatcaatcagacatgccaccactccacatgttcatacatatcaatttccctttttcagggatcaaatacacatcaattccctttctcagggatcaatcatcaatacacagctcatggccacatgtaacatcacccacctctgggttccactcacatatcaaacatcaaataccctttcacagggttcagaccacatgtcagacatcaaataccctttcacagggttcaaatcacgttcatcaatcaatcatagcattatccatcatccctctgctaacatacatacataacagaaccataaccccactgggtttatggtggaacacagcagaggttacacaaacaagaaccaagagcttacctgctatagacagatcaccggctctcccggcctcgtggtcaacaccaccagagctctcacgctcacgtcctacacaagacaagcacatatacatatcaaatacggttctagaccgttcaaacgaaaggaaactctcatcctttccataaacataaactaatcacttcacaagtgattatctgatcctcaataggatccctctcagcctacacaaggctacagagcctccacaaaagctctgatcaactattgccaagcatatctctgcttacaatggcctaaatccaacctctcttaatcatcagtttcaactgatcaaactcatctacatagtctcatgagcaactttgtcaactgctctaaggtctagactagtcaactagtcaaccttttatctctgctcagactgactcagagccaaaatcaaacttcatcagtaatgatgattcaaggttctaaactcctcagaatagtcttctgagcataaaactctacagagtccgagcctaataacggctctaacgcctccaaaaacacccctcaagattaccccaaaaccacataatccaatccacagaaccaccggttagagctcgagtttcttacctctgtggtgttcagaaacaccaggggatagctttccccaagataactcgcccaatcacggcctctttcgtctttagactccgagctctcaagggttctctcagagaaatcaaacctcgctgtttctcagcttttctcaagaatcaatcggggtatctcacttatctcgaggtgctgatcatattctcagttgggtcggcggtgtttagatgagctatgaagaagatacaaagctcaatggtcaacaatggcttccctctctttctttcctcttttctctctctctctctctcttcagccctcaaatggcctttataaaagcataccgtcgatcccacgctgatagcgccgcatttcacgcacttcacgctgttggcgtcaactttcacgctattagcgtgaaaggatcgaatcaattggccagatttacatatcccacgctactagcgccatctccacgctactagcgtcatccattcgaatgatccacgctattagcgcggcatctcacgctgatagcgccgtggactcggccagtccacgctgttagcgtggcatctcacgctattagcgtgagatgttcgaaactgttttctccttcttttctcaaccattttcttaagctttcttcaaaggattccaaagcatatttataattcttaatcttatgcttaatccggcttaatctaggcttaaacacatggttaaaattccagatattacaagcaggtcctgggcaggatcatgtcttagatggattggaattttgcggacaaaattcctaaaaaggaggggtgaatgtgatgaccctgagacctggcgcaagtggcgcgaggatccggcggttagcgccaggtcctttctgtagaaaaccctgtacagggtgaggcgctgatggcaccaggtctggctcgaagagtgccagactctctggaatgtggcgcctggggcgccaggctcgcgctgagagcgcaagattctctggaagttcacacctggagcgccagagttggcgctggggggcgccaactgggttaggattgtggcgctgatggcgcagtgttggcgctgatggcgccagaggttctggtaagtggcgctggaggcgcggggatggcactgggggtgccagacccaccgccatgctagcgcgagtagcgccaagtttggcgcggatcacgccagacctctgacaggcccagtatataagggctgtcgcgatttttagaagaagaaaaccttcttcttcttcctctggacaccagcagccatgggagaggttcccaagctcccttaaccttactttgtgaccctaaacacttcctaaacccatcaaacctcctagaaatcacttgtgagctagaatccttcctccatttcaccaaaaaccccatgctttgagaaaccccattctcatgagaagttgaagaactcgagtttagagaggattggcagctacccatggacacccaagcttggaggagtgtctcagaggtcctttgtgtcgccatagaggtaagaaactcgagattccttggttgttttaagatttggggttttgggtgaataatgacccatttgtgatagagctagaattagctctaggtctagttgagtgatgtgtttagtatgatgagaggaggaaggattagctttcagttagtgatttggtgaatgttggttttggctctaggttgtgcatgtgtgacttggactgagtcacttgatttgagacatgcaaaagccaaaatgatgggcttgtggtgcctgtgaggccatgggaatggtgtcttgtgagatagaccgtccaagccctatggaaaccctgggtatttgggttgtgagagctgtgatgcccattgttaatggctggtgttgagtctgtgggggctctgaggccatgtttgatctgagatagaccactgagggtctatggaaaggcttgtagaggatgagcctgaggaaccttaggtagataacctgggttgatagaagggactgaggttcctttgtctgaggcagttgaggactatctgatgagcttatggttgttatctgcttgaatggtctgtgatatgcatttgtgtgccttgttagggcttgacactgtgggtgtcagagacgcaggccatagttcgagattgaagatgtgagacacggcttgccaggtaagctcatcgttctgggaatcattccatttctcttgtttgccacccaagtgggtgatagttgcatgccatgttttattgtatatatgtttatgtgcatgctgtggagagaaaggccaatgtggcttgttgttgttgataataattgttgtgagacgagaggctagatgaacggtgcttggagtgagactcagaccgttccagagatattttgagcaatgatggcctagtgtgtgctgggctgaaatgatgaaccttaggatagacactgagatagtgtgagggtgttttggcacctgtggtttcaggtgtgtggccttgggcctctggattgatgaacactgtgagagcgttctgtgactctttatgagataaagaccatgagatggtcagtgctggaatctataggatactggaatagtatcgggctagatgaggttccctagccagaggaagagtttgaggactcccttggaatggctgatactccttgggaggtgccactgctctccgcctaaagtcctaaggatggattgccctgtatggatgttcctgcttcggcagtgatgatgaaagtcctgagtggttatcctcaagccagtttctggaaagtccagagggatgagagctccctgtgtggatagtctctctcaggcaggtgattagagatcctgagggattgagagctccctgtgtgtggatagtctctctcaggtatctgactggaaagtcctgagggattgagagctcccgatgaggatattctctctcaggcagctaatgagtagtcctgggggattgagagatccctgtgtggatagtctctcccaggcaatggaaaatcctatgggatgagtgctcctagtgtggatagtctctcataggcagaggactgaaagtcctgagagatgagagctcccggtgtggatagtctctctcaggcatgtattgtgaaagtcctggacgtgattacccagtgtggatgttctttcccaggccagtgtatatgaaagccctggatgtttgccctgtaaggatgttcttttccaggccaggctgtgtacagatatgttgtatctctaatagagggcttcccgaggggatgagagcctagggcctcttagatgagccatatctggattctttaagtcttgagtagatgactcaggcaatgcttgttttagtggatgaggcggtgcctctctggtatggaaagtgtccagtggttgacacttatgttacggtacctctgtgagacgagtctgagatggcttgagagcaagtatgaggtgggatacctctgatgttaatagtatccagttagtacccagatagctgggaatgtgtgatagccaggatgatgtcctaggctttgttatgatttggttatgtgtctgtgcttgggggtgaatcagggtaagggaggatctcctagaaccctgagtttactgagatttttatctcacccttgttgtaggttgtggttttcaggtgcttctagaggagaggagctaccacagggcaggaggccctagtagagtgtgctggagtggtcatgggctgcagatgaagactagaagagtttttctttttatctctgtgttgtttttcccggtgtagggatagggtgtgtgtacactgttgcgaacacgacaagtgcaccgttcgtttcaagtaataaaagtaggtaagtagagtatcgtctccacagggattggggtgaaattcacagtaatattatgtctaagtaattggaagtaaaaaggaaaagacaatatttttggagaattgtttgttgagttgattgaatataaaactgaaattaaaataaatagtaaaataagttgaaatgttaccaatggaagagacaattgtggtcaggcacactcactaatgttctctacctctttcacttaactggtttattaagtttgatcactcaatgatacatctttccaagtttagtaaattctaattccttagcaatttaaccctttaacaataatcctaattccttagtgattcttgtcaagcttataaaagactatatcaaaggggttgctatttcctattgttcagagaataaatcttttctactttagttaatccttaatcccttagtgaattaaccctttaacctgaatcaaaaacccaatccgttggtgaattctatcaaattaagcatgtaaaagactatattataaggttctgcagccacgcatccttatccctaggtaatgaataactgttattttactaaggtcataaattagaatcccaacgtccccattgtgaatcctaaccctcaatacctaaatagaatggccaattctaaataagaataaaacaataaagaatagagtaaaataaaacaatcaagaattctcattcaataccagtcaagttacagaggagtttacattagttcatggccttcccacaatacaaagtttagcctgccataggcttcaaagaaaccaaggttgtcaaataaaacatcattctgcagtggcctagccttgatccttgacttccaatgatttctaagcctttgagtggtgtctaatggtgtagagagtctagtgtgtctccttcttcagtccagaggccttgtatttatagaatggtttaattagagtaacaaagccccttcctgtgcccaatttcgaaccaaatttttttaaatcaggaaacagcgccttcgcagcatagatcgcgcagggtgtggtgctgatcgcgccacaagttcgaattcatggcgttagtagcgcgggagtctgcgctgatcgcgcgaatagcacgcatcaagactgccttaaaaccttctggcgcggatggcgccgggaaccgcgctgatcgcgcgagagcttcgaatggatggcgctactggcgtgaacatggtgcgactggagcggagttttcgagctgggcactgtatttttgcatgtggagtgactcgcgcgggatccttgacctgcttttcttcttcttttgctttattctcctcctttccggccctgaaacgcatcttggtaatgaaatgagctataatcaaatataattaacaaactagcctataaccaatctaattcctaatgatttaatcgaagtataatctcaaactagcctaaaactaagatgtgtttgcaacacatcatacacccattgttctgtacatatttatgttgtataaccacagtgtggtctagtatctgttatgtatatgtacagaccctgttgttgtttgtatagtatgaggttcctcctgattgtcttaatttagttttgtatatttgcttatgtggatgcttgttttttttatgttacatttggatcaacaggggcttgttttatgtgttatgatgtggttttatattccatgcataatgaaatcaagaaattcgattctatcgcttccgcaccgcttttatataacgctgatagcgcgattatgatattattgatgataacacgtccggggtgttacacctctaaggatcctgagcttactgagatgtttatctcaccccatgtggggcttatgtgatttcaggtgactcttatggcagagaggagcggtctcagggcgggaggccccagtagagacagtgattgcttggccatgcggcagcagggagagctgggtggcttagatgtgttttgatgatgttttgtacccctgtagagggaagacgtgtgtgtgtgtgtgcacacatgtattcttttgtattgtacatgccatgtatgccctcgtgtgaggaaggatctgtgagatcagaagcacgtagatgcttattcttttgtagcacgcataaatacacaaccaatctagtaatacagaataaacatacctatgtccgaagtggcggtctggctcggacgcaacgggcaaagggggagcaatcggtggaaatctaagccatgcccaaatctgaagcaaaatagtacaaccaccaatgtcttttctatcggggtctgtgcattcgcacaactgtctaaacaagtttgccagcaccgcagacccccagctatatgtaccaatatcagcaaagtcaccaccaagtaaggcgatgtaccgacatcctaccacgctcccccttgatctgttgcataggatgcaggctcctaacattcgagcaatgtgagccttcgtgaagtatatcacattctgagggttctcgacaacaaaatcccatgaaggatacactctgtccaaatatgataacctcaaactgccggtgcataactcggtgtccggatcagggtcgttaccaaaaacctcgttacacaattgggtccaatctgtgtaggtatgtctagtaacggcttgcccatcagtaggcaatcctagaatacctacaacatcttgcaaggcaatcgtcatctcaccctggggcatatggaacgtgtgtgtctctggcctccagcgctcaaccatagcactgataggagtagcatcaatctggaaaatccaagtaacttatcaatttatgcgttccaaatacatcatgcttgaaaccatcaattttaaaattacaatttcaacacattaaaattaacaatattcgttaatcgatacctgcataaacttcatgcgagccacatgtatgaaaccagcctcagtcaaatactgtgctactacgtccggaatatcgtcgggtcggggtccaccaataagtctacctccgcgacaaatcttcaactctctctttgtctcgtcattccaaattgcctgtgaaatatgagtgtgttgcctgcgcctctgaagtacatcccatctgtatggtccgggaagaacatgcattgtgggatcggtaggctcatgctcacggtcagaactgttagatatgatgcagaggttaaggatgatcatgaagaatcaagtcaagctttatcttaagttttgattttacatgcccactcaaattgatggcatatgtactttgtttaaaggcttggttcaagaaagatataatcccgcattcctcacataaactgaataagtcatgcatacattagctcattaattcatgattaggtcacacatattccatgaatcatttggcatgacattaaagcattaaagttttcataaaaaagtgtttttcactgttttaatcgattactgatcatacttaatcgattaattgcttggttacataactgcatttaaagatatgaacactttaatcgataccaaatgtttgtaatcgattacattcagctgacttggttaagtcgttctgtgataatcgattacgtgatggattaatcgattatttgtccatctgcataattttcaaaagaaagtttatctggtttaatcgattaccagagtattgtaatcaattaaataagcattgatacgtttttcacactccctgtgttaatcgattatttgaatattaatcgattacttcagtgcttcacaaaatccagatcctctgtgataatcgattacgacatgagttaatcgattatttgtttttaagaatttttccagatttcacatgaacactttaatcgattattttggaactttaattgattacatttgttaaaataatcgattacagtcagttaattctgttttttataaatagatacaactcattaagtgagaagagacttttagttttacgaagtaagccttgtaaacacactctcaggagattttcaaagcaccaaggctctttagaaatattcattgatttggtttcaagaatcatgaatctcatgtgttgagtcatattttcatgattagtttttgctaaagccttatttgtcaaaaagaaatcatcaagaaagatcatgacattcattctcagtctggtttgatcatttaaactcattcatttcactgaggatgttcaggtgatatctttctttttaatcaatttctttgttgttttgtatagaaattgtttgttttgatggtttgttgttgatacaacaatttgtatctttaaagcattactagataggtatctagtgggtagaacagagaagggatctctggttcttagatcttttgagaagtctataggtttagattttgaattttacctagggtgggtaaaagagatccgtgtttgcttgtaaagataatcattttgttatagtggaaactctaatcgaggttgattagaagtaaaactggatgtagccgccggggttgagaggtgaaccagtataaatcttgtgtgtaattgtaattttctgttcatattcatattgttcttgaagtattatttttgttaacatcacaagattgtgtgaagctcaagagtgggttgattgagataaaagttgattttaaaagtttgatattttaattggttaagatacgatccttctttcaaagtcttccgctgtttacaaaattgttaaattttaaaaactctgaggaaaaaccaattcagcccccctcttgcttatttgcataagtgttcattctatttttcaagaaccagaacgaggtgactcagatgatgatgactcagccataataatatgctacacattttataattatattagaataatttacctaatttcaaatacaaattatttttacaaattcattatgtatctcttacgtaagtcgttaattacagcttaggccataacctaggtcattaactaataatattctaagtttggacatttcaatgcaccaaatgtaaaagggctgaagaaggatagtgtagcggtgcggttcaacgtagcggacgtcgtgcccgtgacatgtggttcgcgaatcgcccgcaatcgcggaggacacagttgcgactgcgtttgagcgagctaggtcaaaatattgcacgtcttatttttttcagttcttctgcacgaacaccattgaatccgaccttgttcgttcactctgaccttcttcgttcactcccaccacgactaataatattctaagtgactaactaataattttctaagccgataaaccaattcataacctacgtaactaactaatgaaaacctaggtcataacttacgtaattaactaataatattctatgccaaataaatgtataacaagtaacaagtaacaatttctaggcaaaaaaaataaaaaattgtagtttaaaaaaaattacgaaaacatggcagtttgaaatgtatttacagatgtatttaatttgctatttattaattttttcgcccaatttctaacataaataacaactaacgagtaacaatttcctatataaaaaacaagtaataataaaaaaacaagtaataatctaagtcataatctaacaagtaacaagtaacctaggtcacccactaattgtaccctaaaccctaaacctaggtcataatttaagtcactaactaataatattgtaacctaaataaacctacgtaattaattaataatattctaagtgacaacaacatatctaatttccaacctaagtaaataataattctttaatacaacaatataatatattacatataatttaaaaaacatttatttcagcaggacttacttgatttatagagcttccttgcaccaagcctcaaattcaaatcctattctagagagaagccagaggaaaaaattttagagcgagtagcaagtgtgcagtgtgggagaatgcttgaggtatatataagggagttggatcacgtccttgggtggcgtgaatggagctgggtcacgtccacacaggacgtgaatggtgtcttggtcgcttccatggaggacgtgaatgggtgcctagtcgcgtcatagcacgacgtgattgaacacgtctcctgtgcacatgaatgaacacgtcttgtccgtacgtgtttggctgcagtagattcgaaaatacttttgagacagccatgtttttgtaattttttatttaattttctatttattaatttttttgcccctgggagggtgatatagggaatatacagaaaagcttgggcaatttctctctctattccccttctctctccaaaccgttatttctctaaattcactttcttcctaaattcattttctgaatctgatcgtagtccttcattggtgctttcattgcttctcatccttcctgctatggccgacaatacacacatgagggatctgcaacaacgtatggacatgttggagcagcaatttcgtgcatctgaattggttcgtgaacagcaatacatgggtcttcaggaatctaacactcagctgctggattcccagactcagctgcaggaatcacaaaatcgcttgcatttggatcttactcgtttgattgagctacaccaacaatcactgggtacttaacattccaatggaggtattatgggttctggtccgcagaatggtggtgaattttctagagttcgtcaagttaagcttgattttcctcgctactcttctggagatccaacgacttggatcatcactgcagaacgctacttcgccttttaccaagttcctcttctagatcgtttgaatttggccgcgtttcatttggatgaaccagcggggttctacagttcagatcagaatggcttaatgcctgactggcgcacattttgcacagcggttcattgccgatttggcacatcgaaatttaaggatctggcaggagctttggttaagcttcaacaatcaggttcggtaattgattatcagtcctcctttgagaagttagtgagtaaagtccctggtctaactgctccgttatttcgtagtatctttacttcgggtttaaagcctcacatacgccgtttggtactcactcaccgacctcaggattaccatgaagccttttcattagctcgagtatatgaagaccaatcttctgaacccaaaccttttcatctctggtccaattccccaaaattaccatccactaaccatgtatcatctactattgttcccagcaagcctcctcactcccaaacacttaccaatcctctttttgctattcccatctgccgtcttttcccagctgaaattcaacagaaacgtgagaaaaacttgtgctataattgtgatgaacagtactcctttggtcataaatgtaaaggtcgtgcagtcttgttgtatttagtaggcactgacaatgatcgtgactcggctcccattacaccagaacctatgcctgatctttttgtgtctgatgtggctcctgaaattagcttcaatgcactatttggtcatagttgttctcgttcttttcgtcttactagtacgataaagggcaaaccagttcaaattttggttgatggaggtagtacccacaactttattgctgccaagatggcttactttttgtctttaactatgcaacatgtcactactttgcaagtgcaggttggtaacggtgatgccttaccgtgcactgctaaatgccccgcggtctctttgagtcttcagtctcacacttttactgttgatttgtttgtattagacctcaaaggagttaatgtggtcttaggggtccaatggttatccacctttggacctattatcacaaattattcatagatgaccatgtcttttagtcacaacgatagtacagtggttttacatggggattcccttatcttgcccacacctatatccaatgctcagcttcacaagttaattgctcaaaattctatttcttcctatttcatgtgccttaccagtacatctcctagcccaccacaacccccagatttaccaccccaaccccttcctcccatacaacacattttggacaacttttctaatatttttgccagtcccaagatcctaccaccagatcgagccttaaatcactccattaaccttatcctaaattctaagcctgtccaagtgagaccctaccgatacccacatttccagaaaaccgaaattgagaagatggtgggggaaatgttggctgatggtattattcaacccagccactctcctttcagttcaccaatattgttgatccataagaaagatgggacatggaaattattattgtgcctttaatgctatcaccattccggataaattttcgattcctactgttgatgaactcattgatgagttacatagagcacaaatattttctaaacttgacttgcaattgggctaccatcagattaaaatgaatctccttgatgttcataagacgacatttcgtactcacaatggccactttgagttcttagttatgccctttagcttatctaatgctccatctacttttcaggccactatgaatcgtgtctttgcccaatttttacgatgttttgtggtcatcttcttggatgacatcctgatttctagttcgacattgcaggcccatgaaacccatctcacacaagttctccagactctccagcaacaccaattttttgctaaactcacaaagtgtttgtttgctatgcaggaaatacaattctgaggccatattatttctactacaggtgtcacacctgatgcttccaaggttcatgttgtctgcgattggcccactcctaattcagtcactcaactacaagcatttttgggtctctcaggattttatagacgttttattcgcagatatgcgatggttgcagcttcccttacagacctccttgccaaggatgcgtttgtttggacctctgaagctgatcacgcttttgtctccttgaagcacttgttgatgacaactccaattttggcattgcctgatttctccttgccatttgttcttgagattgatgcctcaggtgttggagtaggggtcgttttgttgcaagataaccatcccctttccttctttagtcgcaagctctcaaaactcatgcaatcaaaatccatgtatatcagggagatgtatgccattacctctgctgtggcaaagtgcagacaataccttctgggattgacctttataattaagacggatcatcaaagtctgcatcacttgatgacccaagtcatccaaatgccagagcaacaacaatttatagcgaaattattgggttataactactctattcagtataaattcgggaagcacaatacaatggcagatgctctatctcgctagccagaggggagtactacttccttgtccccaactttcatgtctatcagtaatcctacatcacaatacagttttgttatacagtctgagttacgattgaactcctatgcgacacaaatattacagggattacagactgatgcaacaaagtggccacattggcatgggcacaatgggctcttattccatcgacagcgtctgtacattcctcaggcctcttcgttgataccactcctgttgcacgagttccattcttctaagatagggggccatgttggagttcgtcgcaccctcatccatttaggagccaaattcacttcgaaaaacatgaaaaaagacgtctaactttttattcagcaatgtgaagtttgttagaaagccaaaccttcaaaccactcaccctatggactcttacagcctctacccattcccgactcgatttggtctgaactaataatggattttattattcatttggctccatcggcagggtatacatccatattggtggtggtggatcgactcaccaagggagcccattttgctgcattaccctctaaatataccgcatctaaagtagcccaggtgttttgggatacagtgggtaaattacatgggattccctgttcaattgttttggatagagaccccatttttctgagtaagttttggcagacgttgttcaaattacaagggactcttttacatttcagctcggcctatcaccctcaatcggatggccagactgagcgtgttaacataagtttagaacagtacctgcattgttttgtccacaaaaatccggcagcttggcactggttcctgagttggacgaagtttcactataacacggcctacaaccgttgctcgggtacctctccatttcatgcttagtatggccgttatccccctgatctgctcacatacaccttgggctccacttcagttgaggcggtagattcggatgtccaacaacaatcttggattctgctatcgttaaaatagaacttaagacatgctcaataatagatgaaagttcaagcagacaagaaacaaaaaagacatcacctttcatccaggggatctggttctcttgtgtcttcaacctttttgtcaactcactatcaaccgtcgatcttcttacaagttaagcttacgcttttacggtcctttcagggttctgaaatgcattggatcggtagcctaccatctccaattactagaggggtctcgtgttcaccctgtatctcatgcttccttgctctgaaattttttttctgacacagtagtaccagattcatgtattaacttcagatcttcactccactccgccgtctcacacaccatgagccgtggtatcacgtcgaaaaatatggcttcacggttgccagatatctcaggtgctggttcaatgggacaggttggccccagaagacttgacatgggaagatgaatcattgttattggccgatccagcatccaagataccatctttggagcaagttgagaccttgccaaaggagccacgttcggatgaggctagtgcaaggaatcaatttcttatcccaccatcaaccaattaagcgccagttgccccatctcttgacaagacaatagatcctgtgcaagacaacttgtctttttccacacgctttgatccactcctttgtgagccatccaaccttgtggacgaggtttgtcttgaaggggtggggaatgttgtaccccaagtcagtggactaagcaatgttaagcccattacagttaagaggaaacccgcatacttgaatgactattttcaatagtctagtaggcctatttacgttaattgtcatttgttgcttattattcttgtaatagataagtggaaacctattgaaattaggatgttatatagcttgggagggtgatataaggaatatacagaaaatcttgggcaatttctctctttattccccttctctctccaaaccattatttctctaaattcactttcttcctaaactcattttctgaatctgatcatagtccttcaatctgcaacatcaaggactagttagtgtaattattaacactaaggttttaaatatcaattgtggtcgcgttgccattttgtcgtgtttgttgatattgtaataaatcgtggacaaatacgacctatgcggtcacaaacaattaaaaagccttgatattaccaccaaataaaccatggttgcagaacgttttttaaatcattgattaacatattatggtccatgtaacatcctcaaaattttgttaagcacttgtggaaatgtgatgatgtttggatacagtatatttgaagaaaaatgactaaatcactctttccatgaagtagaaatttcaagaatacccttagaatgaaaattacaaaaatgcccttgcatattttgaaaatgaccaaaatgcccctaggatgaatggcaaaattaccaatatgcccctaggccaaaaatgctcaaataactttagaaattttgtagaaacttgatgaaattatagaatacacttagctgactaagtatcaacatattttgtgacacaaaactctagaataaaatttctacaaaattttataagatgacaactttgaggctttattcaagaaaactcaagcatcagaaaaatatgtaaaaatgatacataaaatctatagaattttctattaattataggatgaataaacctatttaataaaatggtttagtaattttgatggtcagaagaagaatagaccaattggaattaagataaggacaatcttgtgcttgaggtctgtatagtactctgtagaaattggttataagctattgaagataatttttggaaatctctataattctattatttcatattattttaggtgaaagaattcaaattaaatttgacttcatacaaggaattaccatgtggaaaaccataagtggaattagattttactttagcatcagaaatgacatgtaatggcatataaggaagaaaaacttgtaatcctaccccttaagcttgaagttcacatgtggaatgatgtagaaaaggggagaagattcatgaataagccacttgtaaaggcaagatttataaagaagacaagtggtggacacttggaatatgtatacaagatgagaagaaaaatcttctcttatctcctttggtagaacacgtggacagctctagacattatttcaacaatcccaacggtcaaaagttacatatttgggatagtagtgtacctttaaaattttaaagatatccaacggttaacaaatccagaattataattttactaaaacaggtttgggataaactcaagaatgaaagaaaaagcataaaaatcttccttggcaagctactccacgaaaatgcaagagaaatggagaaacttcaagagcttggacacttgtatggtggagaattaagagcctttatgatttggacaagtgtagggacacttgtaaaggggtggacaagtggaaaggtaagtcattatggtgtaggagatatttttccataaagtgaatcctaaaccactatatatagggggaaggaggacctaagtgaaagacattctccaagctttcctctctacaccttcacgtgaacatcctctcttcatactaccttcatttcatctttctcctttagagttagaatcaagtaagaaaagaaaactccaccatcttgacaaaatttcgtgagaaacctagcaaccttaggaagagttttgacaagcttagaagaaggatatcaaggcttcatctctaagaggatttcccaaggaaggaaggaaggaagccatttatccattctattttcaagattcaaactcacttgaggtaggttaagcttaaatctctagttaatcattggtttggataatttagatgctttagtaggctgaattatggttattatttaggcttgaatttcgtgctatttgaaagatattctttgatgagaatatgttgatttaagccataagataggtgatgatttatacccatcaatattagtgatgtatggaagcccatttgatgatattttttaaggtgattttgatgatattttgggctgtctgttgatatttttatggaaagattttgatttaatttttgaagtagaggatgaatggtatgtagttgaatggtttaaatacttgatgatttgatttgaggattaattagtgaggtggtaggtgaaaggagaataaaagatgcatactaggctttaatcttttattatgaaaatttcaagggattataaattatttgaaagacatattatggattattagttagattagtaaaataattttctgtgaggatattctttgatcatgcctaagttggtaatgattttgcttgaataagatattgcagtttaaccatacttataagcttattggataaggtatggtggtgtaaccatacttatgatacatatgatgatatgatgaaaatattttccataaggtaatatgtattttgcttatggatttgatttttatggatgttgatgtgaataagataggtggatttgtgtttccatgttccaagtccagtacgaggctttggggaaacaaaatctgatgctacatacaatatgatatgtagtacccaagtgcaaggatatatggcaaaattcatgcatgtttgcgtaagactatagccgcgtccacactcagtgtggccacatacagtacgatatgtggaggccatttgccctgggatagttcatctcatgcattcatatagttgcatatttcttgtggatgtgtttgattatttgaatgattttactaacctattaataaggtcgggatttagctttgcatactgagaaatttatttctcacaagatttgtttcatgtttttcttagatggtagccattgtaacaccccgtgtgcactcggcgtattatcattatgattatatcagattagctcttaatcatagtaattaaaaacctttgcggaagcataaatcaaaaccatatttcttgattacattatgtatggaatacaaagcatctcatcacaaagcataagaccggtccctgctaatccagatcacataaagaaaaccataggcagataacacaaatatctcaaagatataaacaggaggaacatatttacataacagaactggttatgtacaaaacatcatctgacactcacagtctctatacaaaagaataagcatccgagtgcttctgatcccaaggacccttcctcacacgagggcatacatacataacgtgtataaaacaaagactacatgtgcacacacatgtcttctctctacaggggtacaaaacatcaaaagctgagccaagctccaagctctccactactgcctcacaaccaagcaggtaccgtctctactggggcctcatgccttgagaccgctcctctctaccagaagcatcacctaaaataacataagccccacacggggtgagataaacatctcagtaagctcagggtccttggaggcatctcctccaccctggcttacttaccatgacacaagtcatcagggtatcacaacaaactggcctcccggccctcataacaatacaagcaagctatctagctctatgtacgatggaccgagccaacgccgacctcagtgtgaaaccgaaattcacacccgtgccatcccatcgggagctaccccttacgcatggacgcacgtatatggtacctccgagaatagacaatcaaccacgacgggacacacctatctcttggtcttaggggatcatcatcaccccgggatccaatcaaccatgagcaaaccaaactaggaggtgcgctctactcctagtataataaccttgggtaaaaaaaaaaaaaagaagttactatagcagttactgtagcccacgcctgaggcgtgggaagccacgcctggagcgtgggaacctctccagaaagtgattttttgctggaatcccacgcctgaagcgtgggaagccacgcctgaagcgtgggaagccacgcctggagcgtgggaagtgttccagaaagccatttttggctggaaacccacgccaggagcgtggggacccacgctggaagcgtggaatgcacggaagaggcctataaaaggccatttctcacgtttttgaaggccaaattcactattcctcttcctctttgagccaggcagccattagagcactctaaaagcttcatatcttcatcataatccattaaaacacctcctaatcacctctaaacttgattagaactcttgagaagccaaaatccagccttattggtgagaattgagagagaaacccctttccctgaagtttttatagaaattaagcgttggagaagcaagaagctggtttcagggagacagagcttagggacaagacttctccagcctttctttgttgatttgaggtaagaaacctctgttttaaccgtttaatttgagaaatgggaattggatgaatagtaaccaaatattgatagggctggaattaggcttaggttctttagggagatgtaatcaggagagtgttctgagccatatggcatgttgaaactgaaattatgatgaagtttgagtttggctctgggaagggagaagtgtgtgtgaatgagctatgttatggcctgaactagcttcaggacctttacaaaagttgttcataaggccaaataatcggtgaaaacgtggttatatatgcgttttggctaaatggaactaatgtggattcttgattctagtataggtttaagttgaactatacagagttctaaagggactctgaggccttggtaatgctgaggcataccaatgagggtccatgtatgcctagtgagagctgggctaagataaaccttaagttagaggactttgaattgattatgagtggaaggtgtttccttccatgtaaacggttgaataccgtttctgactgtttgattcatgcctactgtagggcgtgaagtgcagcttgctggtagagctcaccacgagactaggggagctgattctgaactgagaccaggtaagctcagtgttttcagggaatgtttccctacttgtgtttcactatacccaacattgggtgattgtttgatttgaattgtactctgatgcctattatgttatggtatagatcatgtattgaatattgatgagatgatgtggtgatggctggcaattgcatactagctaaaccctgggatggggtgattacttgatgaatcttgtatgcatatgcattatgatgatgtgataatatatatgtgtgtgttgattgctgatgatatggtttgatggatgctggcaactgaatgctagctcggccctgaaatagggtatgtgcttgtgttgctgcactgagatagtgcatgttacttgattatgatgatgttgaggcatgaattgattgtgatttgattgttgtaatctactggccagtagtgtgaggtactatggaccccattgggaatgtgcccttaagtggatgatctcccttgggataatccataggcgtccatgtaaaccctgaatagatgtgcctttaagtagatgatcctattcaggtattgggcggcaagtcctggatagatgtgcccttcagtggatgatcctatccaggcctagtatgtggttgttgttgacatatgatttattgatactgctatgagttttcagcttatgttctgagattgagaatttaacaaatgctagtgtacttgatgagattttctgtgatataatttctgtttccgttatgatatctgtatagtgatgttatgttctgggaagtgaaccagggggagggaaacctctgaaaaccctgagtttactaagattgttatctcacccctatttggggattatgttgcaggtgtagagactaccgtccctgagagatcccaaggcaagaggcctgagatgggatagagtgaagataactctaggtttagaggactgagcttgctagctcacttttgattattttggttgtattttgataccctgaggggtcatttgcagtgtttagggaaaattggcttgtatataacagtaattcaccatatttgtataaagtatgtatattataccagacttatgcttccttcactgttcattttccatgcttgctgcgttactttgatattgtataatgttaatacgccgggtgcacacggggtgttacattttatggtatcagagcagtgtttagggaagcaatatatggtgaattgcatgtttttccctgtgttttgggtgtacaccatgatttctgcatgtgtgatgttaagtgtgagcctgatcaactcattctgctatattatatatgcagtatcatggtgagaacccggaataccagtgagagggcgggtgcagaggagcaacctgaccctattgtagctactttggcagctgtgcagcaggaactagctgctagtagacaggctaatgaagccttgttaaagacaaatgaggagctcatggctgagttgagagctcaacggaggggagacagagtatcccctacacaacagactcctgaaagcgagggtagtcgccatcaggatggaggtagccatccctctgatgggcctcagtaccagagagggggcaggtcattccaggttgatatagaggaggattcagttactagaggaaggatgttgattgccttcaggaagcatgatcctccctctttccatggggaatatgatcccatagctgctgccaaatggttacaggcattagagaagatttttactgtgatggagtgctcagaccatcagaagcttctctatgccacatatctgcttcagggagatgcacatgagtggtgggtcaccacttcagagctgttgagaggtcagggtgagattatcacctggcaggtgtttgaggcccagtttctggaccggtactttcccagagacgccagggagcagaagcaggctgagtttgagagcctgacacaggggaagatgtctgttgatgagtacttagccaaatttaatgagttggctaagtatgcacatttcaggagggtgttgcctgaagcagaggttttggctgccaagttccagagaggactcagagaaaatattgaagagaagattgcgggcagcgggtccagagatctgggtagcctggtgaggcagtgccgccaggtggaagatatgattaggaggcgcagtggaggccatcccacccaagtagagaggcaggaggccaagagacccggcggagcaggccccgctggtaagggcaagggcagagatttaggagtttcttctccagcaagtaaattcaagaagggattcagacagagaggagtggcccagaggactggtccacctcccaagtgtaatacttgtgggaggaaccattggggggtgtgccccaccggccagttggtctgctacaaatgtggcaagcagggtcactatgccagagagtgcccacaggctggcagtcgggctatagctgccccagttatatcagcagcccctaccgcaggccgggtctacacagtagatgctggagaagctgccagagctcctgatctgatcagaggtattatttttattgatgcatatgacattagagttctgtttgactctggagccacccattcttttatcagtgaccgcactactcagagactggacttgcctatgtccagactttctgttcccatagaggtcactactgcctctaaggagcggtgtatggtggataggtgttgtagaggggtccatttccaatttgagggtagagaatatgtagtggatctacattgtttggcgatgcctattcttgaggtcatcttgggtatggactggttggccaaatatggcattatgttagactgctgtcacaagaaggttgtagtgccttcagatggagtcaacctgagttctgtttcattcctctcagtgttgcaagtccgcaaggaaatacagggaggagctcagggatacttcttgttgagtacagcagttgagaaatcggggttggatttgtcacagattccggtggtaagggagtttgttgatgtgttccctgaggagattacccagcttccaccggataggggaattgagttctccattgatctggttccaggtgtgggacctatatccatagccccttaccgcatgtctccattagagctaaaggaattgaaggtgcagttggaggatttgttgtccaaggggttcatcagacccagtgtcaccctggggagcaccagttctgtttgtgaaaaagaaagatgggagtatgcggttgtgtgttgattacaggcaactgaataaggtgacaataaagaataaataccctctacctcgcattgatgatctgttagatcaattgaggggagcctgtgtgttctccaagatcgacctgagatctgggtaccaccagatccggattaaaccagaggacataccgaagactgcattcaggtcaaggtatggtcattatgagtatcaggtcattccttttggtctaactaatgcccctgcagtgttcatggattatatgaacagggttttcaggccatttttagatcagtttgtggtggtattcattgatgacatactgatctattcgaagtcagaggtggagcatgctgagcacctcaggatcgttttgcagatcttaagggagaaccagctgtatgctaaattatctaagtgtgagttttggctttcagaggtgaaattcctgggccatgtgatttctgcagctggagtagcagttgatccgagtaagtttgaggcggtgatgtcttgggagaggcccaagaatgtttcagagatccgcagtttccttggtctagcaggttactaccggaggttcattcagggattctcacagatggtgttacctttgacccgccttactagaaaaggtagcccatttgtttggactcatgaatgtgaggagtgtttcttgagattgaaggaaaagttaaccaccgccccagtattaactcttcctgatcctgagggttgctttgaggtttattgtgatgcgtccaagcagggacttggatgtgttctgatgcaggaaaagagagtggttgcttatgcatccaggcagttgaaaccacatgaagagaattatcccacacatgacttggagttagcagcgattgtgtttgctctgaaggtgtggagacattacttgtatggtgcgaaattggtggtattcagtgaccacaaaagcctcaagtatctgtttgatcggaaggagctgaacatgaggcagagacgatggctggagttcctcaaggattatgactttgagttgaagtaccatccaggaaaagctaatgtggtagctgatgctttgagcaggaagcatgttagtattgcttgtcttatgatctttgattgtagactgattgagcaattcagagatatgcacttgtccgtgatagagggtgctgagggtctagagctgagaaggacccagattgagaatgatttgattcagaggatccgggaggcccaaagacatgatgatcgtgtgagaaccatgtttggtcagcaggatgtctctagggatgatcaggatttgatattataccagggccggatcatagtacctaaaggcgagcttgttgatgcagttctgacagaggctcataaaagccagttcagcattcatccaggtgccaccaagatgtatcaggacttgaagaaaaagttttggtggccagggatgaagaaagatatagctgagtatgtgactagatgcctggtatgtcagaaggtgaagattgagcatcagagaccgtcaggcctactgcagccgttacagatcccagagtggaaatgggatagcatttccatggactttgtggtgggattaccgaggactcagggtggatgtgattccatctgggtcatagtggataggctgactaagtctgctcacttcttgcctgtgcggactgactattctgcagagagattggctcagctatatgttcgggaaatagtcagactgcatggagtcccagagagtattatcagtgatagagacccgaagttcacttccaggttctggagtgcgcttcaggaggcctttgggactcagctgaggctcagcacagcctatcatccttagacagatggtcagacagagaggaccatccagactctggaagatatgttgagggcttgtgcattggagcagggagccagttgggataggtacctacctctggtggagttctcatataataatagttttcatgccagtttgggcatggcaccttatgaggcactgtatggccggaggtgcagaactcctgtatgttggactgaggtaggtgagagacagcttcttggacctgagatggttcaggagactactgagcagatccgtatgatcagagacaagttgctgaaggctcagagtcgtcagaagagttattatgatcataaacacaggccactgcagttcgaagagggtgaccatgtgtttttgaggctgtctccggtcacaggtgtaggacgggtcttgggtgtgaggaagctgagccctagattcattggtccctatcagatacttcagagggttggaccagtggcatataggctagctttacctcctcagttgtcagggctacatgacgtttttcacgtgtcacagctgaggaagtatgtaccggatccctcacacgtggtggaacctgacactgtccagattagagagaatctgacgagtcctacaagacctgtgcggatcttggatcgtatggagaagaagatccggagtaagaccattcccatagtcaaggtacaatgggaagggaggacacctgaggaggcgacttgggaacgagagcaggagttgatacaactatatcccgagttgcttgacaggtatgtctttaaattttgcggacaaaattcttaaaaaagggggaagaatataataaccttgggtaaaaaaaaaaaaaaaaagaagttactgtagcagttactgtagcccacgcctgaggcgtgggaacctttccagaaagtgattttttgctggaatcccacgcctgaagcgtgggaagccacgcctggagcgtgggaagtgttccagaaagccatttttggctggaaacccacgccaggagcgtggggacccacgctggaagcgtggaatgcacggaagaggcctataaaaggccatttctcacgtttttgaaggccaaattcactattcctcttcctctttgagccaggcagccattagagcactctagaagcttcatatcttcatcataatccattaaaacacctcctaatcacctctaaacttgattagaactcttgagaagccaaaatccagccttattggtgagaattgagagagaaacccctttccctgaagtttttatagaaattaagcgttggagaagcaagaagctggtttcagggagacagagcttagggacaagacttctccagcctttctttgttgatttgaggtaagaaacctctgttttaaccgtttaatttgagaaatgggaattggatgaatagtaaccaaatattgatagggctggaattaggcttaggttctttagggagatgtaatcaggagagtgttctgagccatatggcatgttgaaactgaaattatgatgaagtttgagtttggctctgggaagggagaagtgtgtgtgaatgagctatgttatggcctgaactagcttcaggacctttacaaaagttgttcataaggccaaataatcggtgaaaacgtggttatatatgcgttttggctaaatggaactaatgtggattcttgattctggtataggtttaagttgaactatacagagttctaaagggactctgaggccttggtaatgctgaggcataccaatgagggtccatgtatggcctagtgagagctgggctaagataaaccttaagttagaggactttgaattgattatgagtggaaggtgtttccttccatgtaaacggttgaataccgtttctgactgattgattcatgcctactgtagggcgtgaagtgcagcttgctggtagagctcaccacgagactaggggagctgattctgaactgagaccaggtaagctcagtgttttcagggaatgtttccctacttgtgtttcactatacccaacattgggtgattgtttgatttgaattgtactctgatgcctattatgttatggtatagatcatgtattgaatattgatgagatgatttggtgatggctggcaattgcatactagctaaaccctgggatggggtgattacttgatgaatcttgtatgcatatgcattatgatgatgtgataatatatatgtgtgtgttgattgctgatgatatggtttgatggatgctggcaactgaatgctagctcggccctgaaatagggtatgtgcttgtgttgctgcactgagatagtgcatgttacttgattatgatgatgttgaggcatgaattgattgtgatttgattgttgtaatctactggccagtagtgtgaggtactatggaccccattgggaatgtgcccttaagtggatgatctcccttgggataatccataggcgtccatgtaaaccctgaatagatgtgcctttaagtagatgatcctattcaggtattgggcggcaagtcctggatagatgtgcccttcagtggatgatcctatccaggcctagtatgtggttgttgttgacatatgatttattgatactgctatgagttttcagcttatgttctgagattgagaatttaacaaatgctagtgtacttgatgagattttctgtgatataatttctgtttccgttatgatatctgtatagtgatgttatgttctgggaagtgaaccagggggagggaaacctctgaaaaccctgagtttactaagattgttatctcacccctatttggggattatgttgcaggtgtagagactaccgtccctgagagatcccaaggcaagaggcctgagatgggatagagtgaagataactctaggtttagaggactgagcttgctagctcacttttgattattttggttgtattttgataccctgaggggtcatttgcagtgtttagggaaaattggcttgtatataacagtaattcaccatatttgtataaagtatgtatattataccagacttatgcttccttcactgttcattttccatgcttgctgcgttactttgatattgtataatgttaatacgccgggtgcacacggggtgttacattttatggtatcagagcagtgtttagggaagcaatatatggtgaattgcatgtttttccctgtgttttgggtgtacaccatgatttctgcatgtgtgatgttaagtgtgagcctgatcaactcattctgctatattatatatgcagtatcatggtgagaacccggaataccagtgagagggcgggtgcagaggagcaacctgaccctattgtagctactttggcagctgtgcagcaggaactagctgctagtagacaggctaatgaagccttgttaaagacaaatgaggagctcatggctgagttgagagctcaacggaggggagacagagtatcccctacacaacagactcctgaaagcgagggtagtcgccatcaggatggaggtagccatccctctgatgggcctcagtaccagagagggggcaggtcattccaggttgatatagaggaggattcagttactagaggaaggatgttgattgccttcaggaagcatgatcctccctctttccatggggaatatgatcccatagctgctgccaaatggttacaggcattagagaagatttttactgtgatggagtgctcagaccatcagaagcttctctatgccacatatctgcttcagggagatgcacatgagtggtgggtcaccacttcagagctgttgagaggtcagggtgagattatcacctggcaggtgtttgaggcccagtttctggaccggtactttcccagagacgccagggagcagaagcaggctgagtttgagagcctgacacaggggaagatgtttgttgatgagtacttagccaaatttaatgagttggctaagtatgcacatttcaggagggtgttgcctgaagcagaggttttggctgccaagttccagagaggactcagagaaaatattgaagagaagattgcgggcagcgggtccagagatctgggtagcctggtgaggcagtgccgccaggtggaagatatgattaggaggcgcagtggaggccatcccacccaagtagagaggcaggaggccaagagacccggcggagcaggccccgctggtaagggcaagggcagagatttaggagtttcttctccagcaagtaaattcaagaagggattcagacagagaggagtggcccagaggactggtccacctcccaagtgtaatacttgtgggaggaaccattggggggtgtgccccaccggccagttggtctgctacaaatgtggcaagcagggtcactatgccagagagtgcccacaggctggcagtcgggctatagctgccccagttatatcagcagcccctaccgcaggccgggtctacacagtagatgctggagaagctgccagagctcctgatctgatcagaggtattatttttattgatgcatatgacattagagttctgtttgactctggagccacccattcttttatcagtgaccgcactactcagagactggacttgcctatgtccagactttctgttcccatagaggtcactactgcctctaaggagcggtgtatggtggataggtgttgtagaggggtccatttccaatttgagggtagagaatatgtagtggatctacattgtttggtgatgcctattcttgaggtcatcttgggtatggactggttggccaaatatggcattatgttagactgctgtcacaagaaggttgtagtgccttcagatggagtcaacctgagttctgtttcattcctctcagtgttgcaagtccgcaaggaaatacagggaggagctcagggatacttcttgttgagtacagcagttgagaaatcggggttggatttgtcacagattccggtggtaagggagtttgttgatgtgttccctgaggagattacccagcttccaccggataggggaattgagttctccattgatctggttccaggtgtgggacctatatccatagccccttaccgcatgtctccattagagctaaaggaattgaaggtgcagttggaggatttgttgtccaaggggttcatcagacccagtgtcaccctggggagcaccagttctgtttgtgaaaaagaaagatgggagtatgcggttgtgtgttgattacaggcaactgaataaggtgacaataaagaataaataccctctacctcgcattgatgatctgttagatcaattgaggggagcctgtgtgttctccaagatcgacctgagatctgggtaccaccagatccggattaaaccagaggacataccgaagactgcattcaggtcaaggtatggtcattatgagtatcaggtcattccttttggtctaactaatgcccctgcagtgttcatggattatatgaacagggttttcaggccatttttagatcagtttgtggtggtattcattgatgacatactgatctattcgaagtcagaggtggagcatgctgagcacctcaggatcgttttgcagatcttaagggagaaccagctgtatgctaaattatctaagtgtgagttttggctttcagaggtgaaattcctgggccatgtgatttctgcagctggagtagcagttgatccgagtaagtttgaggcggtgatgtcttgggagaggcccaagaatgtttcagagatccgcagtttccttggtctagcaggttactaccggaggttcattcagggattctcacagatggtgttacctttgacccgccttactagaaaaggtagcccatttgtttggactcatgaatgtgaggagtgtttcttgagattgaaggaaaagttaaccaccgccccagtattaactcttcctgatcctgagggttgctttgaggtttattgtgatgcgtccaagcagggacttggatgtgttctgatgcaggaaaagagagtggttgcttatgcatccaggcagttgaaaccacatgaagagaattatcccacacatgacttggagttagcagcgattgtgtttgctctgaaggtgtggagacattacttgtatggtgcgaaattggtggtattcagtgaccacaaaagcctcaagtatctgtttgatcggaaggagctgaacatgaggcagagacgatggctggagttcctcaaggattatgactttgagttgaagtaccatccaggaaaagctaatgtggtagctgatgctttgagcaggaagcatgttagtattgcttgtcttatgatctttgattgtagactgattgagcaattcagagatatgcacttgtccgtgatagagggtgctgagggtctagagctgagaaggacccagattgagaatgatttgattcagaggatccgggaggcccaaagacatgatgatcgtgtgagaaccatgtttggtcagcaggatgtctctagggatgatcaggatttgatattataccagggccggatcatagtacctaaaggcgagcttgttgatgcagttctgacagaggctcataaaagccagttcagcattcatccaggtgccaccaagatgtatcaggacttgaagaaaaagttttggtggccagggatgaagaaagatatagctgagtatgtgactagatgcctggtatgtcagaaggtgaagattaagcatcagagaccgtcaggcctactgcagccgttacagatcccagagtggaaatgggatagcatttccatggactttgtggtgggattaccgaggactcagggtggatgtgattccatctgggtcatagtggataggctgactaagtctgctcacttcttgcctgtgcggactgactattctgcagagagattggctcagctatatgttcgggaaatagtcagactgcatggagtcccagagagtattatcagtgatagagacccgaagttcacttccaggttctggagtgcgcttcaggaggcctttgggactcagctgaggctcagcacagcctatcatccttagacagatggtcagacagagaggaccatccagactctggaagatatgttgagggcttgtgcattggagcagggagccagttgggataggtacctacctctggtggagttctcatataataatagttttcatgccagtttgggcatggcaccttatgaggcactgtatggccggaggtgcagaactcctgtatgttggactgaggtaggtgagagacagcttcttggacctgagatggttcaggagactactgagcagatccgtatgatcagagacaagttgctgaaggctcagagtcgtcagaagagttattatgatcataaacacaggccactgcagttcgaagagggtgaccatgtgtttttgaggctgtctccggtcacaggtgtaggacgggtcttgggtgtgaggaagctgagccctagattcattggtccctatcagatacttcagagggttggaccagtggcatataggctagctttacctcctcagttgtcagggctacatgacgtttttcacgtgtcacagctgaggaagtatgtaccggatccctcacacgtggtggaacctgacactgtccagattagagagaatctgacgagtcctacaagacctgtgcggatcttggatcgtatggagaagaagatccggagtaagaccattcccatagtcaaggtacaatgggaagggaggacacctgaggaggcgacttgggaacgagagcaggagttgatacaactatatcccgagttgcttgacaggtatgtctttaaattttgcggacaaaattcttaaaaaagggggaagaatataataaccttgggtaaaaaaaaaaaaaaaaaagaagttactgtagcagttactgtagcccacgcctgaggcgtgggaagccacgcctggagcgtgggaacctttccagaaagtgattttttgctggaatcccacgcctgaagcgtgggaagccacgcctggagcgtgggaagtgttccagaaagccatttttggctggaaacccacgccaggagcgtggggacccacgctggaagcgtggaatgcacggaagaggcctataaaaggccatttctcacgtttttgaaggccaaattcactattcctcttcctctttgagccaggcagccattagagcactctagaagcttcatatcttcatcataatccattaaaacacctcctaatcacctctaaacttgattagaactcttgagaagccaaaatccagccttattggtgagaattgagagagaaacccctttccctgaagtttttatagaaattaagcgttggagaagcaagaagctggtttcagggagacagagcttagggacaagacttctccagcctttctttgttgatttgaggtaagaaacctttgttttaaccgtttaatttgagaaatgggaattggatgaatagtaaccaaatattgatagggctggaattaggcttaggttctttagggagatgtaatcaggagagtgttctgagccatatggcatgttgaaactgaaattatgatgaagtttgagtttggctctgggaagggagaagtgtgtgtgaatgagctatgttatggcctgaactagcttcaggacctttacaaaagttgttcataaggccaaataatcggtgaaaacgtggttatatatgcgttttggctaaatggaactaatgtggattattgattctggtataggtttaagttgaactatacagagttctaaagggactctgaggccttggtaatgctgaggcataccaatgagggtccatgtatggcctagtgagagctgggctaagataaaccttaagttagaggactttgaattgattatgagtggaaggtgtttccttccatgtaaacggttgaataccgtttctgactgtttgattcatgcatactgtagggcgtgaagtgcagcttgctggtagagctcaccacgagactaggggagctgattctgaactgagaccaggtaagctcagtgttttcagggaatgtttccctacttgtgtttcactatacccaacattgggtgattgtttgatttgaattgtactctgatgcctattatgttatggtatagatcatgtattgaatattgatgagatgatttggtgatggctggcaattgcatactagctaaaccctgggatggggtgattacttgatgaatcttgtatgcatatgcattatgatgatgtgataatatatatgtgtgtgttgattgctgatgatatggtttgatggatgctggcaactgaatgctagctcggccctgaaatagggtatgtgcttgtgttgctgcactgagatagtgcatgttacttgattatgatgatgttgaggcatgaattgattgtgatttgattgttgtaatctactggccagtagtgtgaggtactatggaccccattgggaatgtgcccttaagtggatgatctcccttgggataatccataggcgtccatgtaaaccctgaatagatgtgcctttaagtagatgatcctattcaggtattgggcggcaagtcctggatagatgtgcccttcagtggatgatcctatccaggcctagtatgtggttgttgttgacatatgatttattgatactgctatgagttttcagcttatgttctgagattgagaatttaacaaatgctagtgtacttgatgagattttctgtgatataatttctgtttccgttatgatatctgtatagtgatgttatgttctgggaagtgaaccagggggagggaaacctctgaaaaccctgagtttactaagattgttatctcacccctatttggggattatgttgcaggtgtagagactaccgtccctgagagatcccaaggcaagaggcctgagatgggatagagtgaagataactctaggtttagaggactgagcttgctagctcacttttgattattttggttgtattttgataccctgaggggtcatttgcagtgtttagggaaaattggcttgtatataacagtaattcaccatatttgtataaagtatgtatattataccagacttatgcttccttcactgttcattttccatgcttgctgcgttactttgatattgtataatgttaatacgccgggtgcacacggggtgttacattttatggtatcgtgccagcagcaagggaccatggcgccaatcgcgccaaccccgcgcctagagcgccaacctccagagagtctggcgccaagagcgccacctcttgcgctaggagcgccaacatccagggactatggcgcctccagcgccataacccgcgccaagagtgccaacttccagaactatggcgccaaccgcgcccgctgcagatcctctgggctgtcccacgccactagcgccaacctggcaccccaggtgtcaaccaccaggacctttggcgctgggagcgccactcccgcgccaagagcgcggcactctagagactgtggcaccaggagcgccacacctcagaaccatggcgttgatcgcgccaccctggcgccaagaacgcaacagttatgcagaaggattctgcagaatccagtgctgcgcgcccaaaactcgcgccgtacgcgctggactcagggttattacagccatggtcaggttctttgaggctctggagtagtgttgatatattgaaggagctatgtactaggctggattttgggaagagtttcgtacttgtataaacttttgtaacagagacattgactaatgtattagtcttacatattttgtaaattttaatgacttagaatttttactaatacacgtttgttgaaaaaaaaatttattctaagtaaaaatactagtaataaaatcaacttagaaattaggttgttacagtccaaataccagttgcggattttttttttaaatatgttgcaaggttttaaatatggcattgcaattttgtcgcatttattgatattgtgacaaaccgtggacaaatgcaacctatgcggtcacaagcaattaaaaagccttaatactaccaccaaataaatcatggttgcgaaacgttttttaaagaaagcatcatcaatcaatatatatatatatgtgtgtgtgtgtgtgtgtgtgtgtgtgtgtgtgtgtgtatgactaacattctcgtaaatataaatatatttgaaatccgtttttgtaaattttttaatatattgttttgtttcacaaaattaaaatgtattattttttttgttcgaattatagtttttgataaatctgaatcggtgatgactttttatatcagttatacatataattattgtaaatatgacattttttatatcgataatgcatataatcaatataaaaagttatgcacataatcaatcttattctgagaaaaaaaaataatacatttcaaattttgtgatgacgaaataataaggagcaaaaaggattagtaattgtaatgattaacaatagcagacatcaaacaacttgaagaaagcctatcaaattaaaataaaagaattcaaaaaatggcaatgagaaagcgtaaaatactcataaaaaatggaaaccttgatggctgcagcaacggcttcagcaacaaggaaagtttgattaagggagaagattgttatgcaatcattgagtatggaacccacttctgaaacgtcatgagcattactccaaattttttcatggaccaacttactatctgtcttaaaagttatgtgactcatatccaagtcagttgcccattggagtgcctgaagcaagacaaaagcctcgtcctccaaaattgacaatctgttgggtgaccaagtggatttagcagtgactagtgcaccaatgtcatcatgaattataaggccccaacttgttagaccttcaggtgactgaaacattgcgtcaatgtttcacttgaagaaaccctcttgcggtttgtgccacttggtaggaggagaggagtaggattgagttgcttagtagttcagattgtgtaacaccctgaaatttctttctccatttacttttctacacgtgtaaaaattttcactgttaaagacaggaaggacaatggaaattttgcactctgaaaattaattatacaactatgtgattaatatattctatgtatgatattaatggtataggtttagagttagttttatttatttctagtgtaaataatttatttagtcagttgaaagaaatttagaaaactgcatgaataaaaaatttcatctttagcgaaattgcaccgcacactaagtggcagtgtaatttaactctttatgagagcgtcctctatgtgaggattactctgggtacatgtattcctagggagattaacacaataatataggcgattaagataagatttactagttttagtataaaaaaatacccattttttacaaatcctatcccttccatttttggcaaaacaacccatttgtggtatggcttggcacgttcaaattggttgccaagggggtcattcaagtatcataaagcgttgtcaatgagagcctacaccatatcttattggcctttgtggaaaaaaaatctgtggagtcttatcccttcattttgcacgaaattaaagcttgagggaggggggtttagttgtgtttcttcttcttcccagctggttctttgtgttcttaagcccttgagttaccaagtttaggtaaatgagcttcattcttcatcctagacttgattcttcttcattctcttgttctagtttatctaattactggaaactgtcatttgttttacttatgaaggaaaactttgaaaaacttgaatattgttcattctctttcaagattccgtgagttcttcaagaggtaagggggtttctccaactcttgaaccatgtgcttattgttgaacttccttgaacatgttgctttgaaattttcgagcttactgtcatgtcctgaatctatgtgttgagctattttcctcgagtttttatgccaaaaatgagttatttgcattttaaaacatagagttagccttaaatttcctttcttggtcataatatttaccaaggaaccattactccaattaattgtgcaattgaatttgcaaataaatttcaccgatcaattaataaaaaaaaaactcaacttcaacgttttctcagttgtcttaactatgttgctgatttcattcggaagcttagcaatcttactgaaccgctttatgatcgtctcaagaagacacctcctccatggaccaatgttcatactaatcttgtcaaacagattaagtctaaggtcaaagatcttccttttctttaccttcctaatcttttagccaaaaagattgctgaaaactgatgcctctgacataggttatggtgtcattcttaaacaatctgttagtgacaaagaacaaataattgcattcacttcaaagcattagaatcctactcaatagaattactctactatgaaaaaagaagttttatcaattattttatgcatttcaaaatttcaatctgatttactcaatcaaatgcttttgattcgtgttgattttaatctgcaaaagaggttttacagaaagatgtcaaaaaccttgcatcaagacatatttttgcccattagcaagcaattttaagcatctttgattttgaaattgaatttcttaaaggcaccttaaactctcttcctgactaccttactcgtgaatacttataggaaaaacagtgagtgtctcagggagagtctaatgccgaattcgacaaagtcttccttctcccgagggagaggaaaaggtggcagaaacatactagcaatagctggtttaatcacccattctaggtcaggattgtcttccaaataggaagttgatctccaaaatcaatctgggtcatctactcaataagggttatatactcatgtccctcaaacacaaactgggtcatctacccaaaaacacaaaccccaatctcaaacaaaggctaactacgccatgcctttacaaactcttcaatccctttaataacaaggtttaacctataggtcttacatccaaatcatgggcgaaaattgcctcggaagaagaagacgatgatgatgaatgtctcctttctaccatgattgaaaatcttaaaaataaacaagttaccctttaccaacctaaaggcaaagccattgttcaccaacctgaacctttggccacccaaaagcctaaatctcaaactcaatacatcttaaaaagcaagtattaggatgttattcaaatggaaccagaattttgggatcctaaaccgaacaagacccctcaaaaaatctttctgaaatattttcaggataatcaatttcactacaaacccatttcaatctatatatcaagacatttttatgagtttattttggttgaatctaattcagtccacattaaacatcataacaacaattcaaatcaaatcgcttattcaacacttcaaattcttaaggttttaacaccaaaagaatttggagatctgaacaaagtaaaaagttttctcaaaactatgtccctttggttttacttactgggattatcaaactacctggtataatgtcttcttttttcaaaacaaagactttatgcactcatggctaatttattttaaacaaaatgtttgatacaaattttctcaatggtttattcattgatggaattattttggtccaatcctagagatacttccttcagaggttgtatctggtttatcaacctttacaaagaaatttcgtttcccagcagacttacatttctttagtaagatgtctctcgcctgaatttttcaatggcgatatgtttatggaaatgtctcaaccaaaggacaactccctatgctccggcgtcaagccctagtcaagtggtagtcttaatttgatcactcccaggcttatccagatcaagttaagctttggttcaaaaatcatcccaaaatgatcaaagctgctgatccagaatatttccagtttctcaatcagaagtcagtagctctattggttctttcatcatcctcgtcaaaggaaaagtttgctaagaatttgcaaacaatccttgatcttttgaagaacgaagaagtttctttgtcagcataaagatcagtagatacttcttcatcatcttcagatgactacattagaatgaagacgattgcttcggaatcaaccttgctgatcattgttcactgtagcggtaggtcatccgattttgtttgctaaaattgtagccatagtaatttttatgtctttataagggttgcgtccttcattttgtaatcaggcttcaaactttagaatttcacattctagacagaagatatgaagaggtactcctctgagagttcttctcaatctttcaatcttgtaatttcattttgagaaacaaaatcttgaccttttctcaatctcatccctttttgtataattaaatcattctcttttcaccttatccttctcatctcgacgacttgttgcacttgataatttcactttaattttatgttataagtttatattttctgcatatttatctggttcgttgccatgtgaatttgtttttattcctaccttccattaattttgtgtatgttttaatatttgattaactttactcacgtcctacttattaacatttttattttagaaaattatataaaagaattagaaagggtatttttaaaataatttgtaacttgatgctattgaaatattcataatgaacttgtgcaaaatagatagaataaaatgtttatatataataatctccatgatagaatattatatttataatacattatcattttgataaaaattaaacttagcatgcataatatattatgtgaatgaaatattataatctttatattgtagtatttgtctgaatttaaaatcccaacgggggtagttgagggtttgtccccttgtctccctcaaaaggtgggattggttcgaattcaaatttataaaagatgggagtaaaaaaatgaaacataatctcattttcatcgaattttatcgggttcaaagaaaatcacaaaaaaatcatctcacatttaaaaaaaaaatatttgttcgtataccttaaatcataaattaagttattaattacattttaattcaaacaatatatatatataatttaataatgaataaataacataaaaataattaaaattaaatttttaaataacatatataaattttaattttattataattagtattatatattattttttaatcaacaaataataatatattataatagcatggcacaaggggtatcataaacccatacactgactacaaagaagaacacaaatttactcaacaatggttatgcaatatttatagatttgagaaaatgttggaattattttggaatgtgggatgtcaaagaagaatagagaaaggtacaagaaaaggttgtatagatttgagcaaatgcggagccaagatgaacaatgtttaatcattcatgggtcagaggggacaatgttttgtccaatattgccagaactggacagaatcttcaaggttggggaatagaaaaaattggcagtttgaaaagaaaattaagcatagggggacaagttaaatgataggtaatattgttactgatgaaaattgttgggtataactcatattgtgccatcagcagatatgcacggggtattgttggtatggctcatactttgctctaacgtattcttacaaggttctattatgaagtttttacctcttctaatccttttggtatggacgaggtggctaatctgtttgctggaagagttgattcaaaggtgaaggaacatttggaggcaaagttcactgatgaatatgttagagaagccctctttcaaatgcattctacaaaggcgccagaccctaatggaacccccgctcggttctaccaatcatattgggacattgtggggatggatgttaccaagctgattttgtctattctaaatgaagatggtgactcgaggagctttaataatactcatctggtgctcattgcgtaagtaaaacttgcaaaaacgtaaactaaaattaaacagcaacatagaaactaacagaatttaaaagaagtgatgcaaaacaaaattaaagcataaatccaattcacctcaccaagaaattcgaatcatcattgttctcagaaatatatcctattataaaagttcattcaatctcattagaagcaactcaatcgacttaacccttaaattgattgaaaccacaaccctaactgaaatatcatccaattaatatgtgattgatattcgaaattaggaaatgaatccataaactaatccgttttcaatactaaatgcattcataatcatgaaaacagaatagcagttgaagaagaagatgaacattcaaatagaattcgaaataccaaaccagaactcaaattctccttatgcttgggttggatccttggattgattgaggatttagccttccatgatcatcatcagtgaaagccccatggaattattgcatgaaaatggaagaacagaaaaacgaaaatgaagaacaatgaagaacaagcaagcacagttgaaagaaaatgagagcaagggttttgatcctaaaaacttaaaagaaggaaatgtaaaactgtttttcttaaatgaaattatgtagtgaaatctatccaatgtcactaatatgtagtgaccaagtctgaagaaaagaatagaccatcaacaaaacccatcaattctaattatttactatttacaaccataaaattcaaattcgcacaagtggagaggttctaacttcgaagctcaaaatgaccctccaaatgacagaattggcctcggactatttctagcaaacttgtagatatttttgttttctttcaagggactccaagaacgctccattcggagttccgtagcactctataagtcttgtacaagtcagatatgtcaagtgagcaaaaatccgtaaatacacaacaattagcaattacgcccacttacttgcctatgccaaaaactgaattggaatggaaaaataaaagtccaaaagaggtcaaataagctaggaatgatagacaaaaattttactaaaagcactctatcacttataccaaagtgtaagaagccaactcaagccagtgaataccatcccatcagctttgcaatgttctgtttaagataatcactaaatctattgtaaacaatatcaagctcattctgccaagcatagttgggagacttaatgtgctttttttccataaccggcaaatcaccgacaatgccttgattgcttttgagatttttcattatatgaagacaaaaacaacatggaagagaggttgcatggctctaaagctagatatggctaaagcctacattaggattgaatggtcattccttgagtgtgttctcagttggatggaattttcatcaaagtttatcaggcttattataaaatgtgtcacaacggtcaactttgcgattattctcaatggtcatcctcatacagagttctctccacaaaagggtttgagacagggagaccctctggcgacatagaagaaaaaaagcttcattgggttagctggcccaaaatggccaagtctaaaaagcaaggaggcatgggttttagaatggtgatgacatttaacaaaactctactagcaaaaaattggtggagactgcaatctcacagtaactcgctcatggatagagttctaaaagctaaatatttccctcataccattttctcagcaaaagatatcatggagaaagggtttatttgaaaggtgggaaatgggatgactattaaagcatggaaggacagatggatacctaattcctttggtaactgtatttccactatcccaaatctgaatgaggatgagaattggaaagtttttgagttgattgaccaacaaaacagaacgtggaaggaagaatcaattagagaaaaattcaatgatcatgatgtggaaaacatattagctattttctcttagagcaggatactcttttgtggaaattcactgaaaatgggatctattaagtgaagtcaggctatcatttggctatgtctagcctccatggacaagaaccttcttctagtgttgttactagctccctttgggaagatatttgaaaggtgaatgtggctccaaaatgcaaaaatttattgttgaggatttgcaaaaacattattcctgtctagctaaatttagaaaagaaaatccatctgttggacatgatttgtcaattttgtggagaggaagaagaatctgtaaagcatgcctttctctactgtaaagaggttgttccaatttggtttgccaacaacttgagtggaagggttccttgtaataaaatttctttcattcactagatagctaaatgctttgaggtaagagatatgtacatatgcaaaacatatttgggcttatttggtctatttggcgtagaagaaatgagtggttgttcgataaaaaaagaacacagctggaactgatcattagtagggcgcagtgggtcgtaaaacaagaaaaattgttgtctcattaaccagtgttgcatccctcttcttggaaactgccttcagaattacaaagatttaaaattaatattaatgctattgtgaagcatggagtgggtacaggctttggttttgtgtgtagggggccatcacgggaacactatggttgctgcaacaaagatacttcagcaatgctattctccaaaaaaattgcaggggttttgtgtatgaagtgggcccttcaagtggaaaaggatatttctcttcactcttttattttgaaaacaaattacttacaactggtacaagcatggaaggcagaaaaaccaaaataatacatttttaatataaaattatgaatttggggttgtttagaaacatattacgaatctgggcacggagacatacccaaaatgggcgtgaccagtcacgtccattttgggcgtgtctctctcctataaaagcttgattatttttttactttttcactacttttactgtttcaccttctctctaaaagtttctgaagtctatctctgctagttttgcaagtgatttagctctgcagcgaagctctgccaacaagtaagttaatttattaattatgcatattagttaatatgctatattattgaattataaaattgttagggccatattatttaattagttttgttgcaaattgttaggtattaggatctagggtttaggatttagttgttaaattaaaattattttactaaatttacttagtgtttatggtttaagggttatggattagggttttgtgattagggtttagtttatggtttaggatattagggtttagggtttaggggttggttgttaaattaaaattattttactatatttacttagtgtttagggttgaagggatagggataatggtttagtttttagggtttagtttaaggtttaggattttaggatttttaggtataaggtgtgtttagggtttagttgttaaattaaaattattttactaaatttatttagtgtttagggtgtttaagggttagggattagggttttgtgattagggtttagtttatggtttaggatattagggtttagttgttaaattaaaattagtttactaaatttacttagtgtttagggttgaagggttagggatttgggtttagtttagggtttaggagtttagggtataaggtttagtgtttagggtttagttgttaaattaaaattattttactaaatttacttagtgtttagggtttaagggttagggattaaggtgtaggttttagggtatagttcagggttaaggattttagggtttagtttttagggtttaggattttaggatttaacaaggtagttgttaaattaaattattttactaagtttacttagtgtttagggtttaagggttagggattagggttttgtgattagggtttagtttatggtttaggatattagggtttagggtttagctgtaaattaaaattattttactaaatttaattagttcagtttagggttagggaataaggtttaggttttagggtttagtttagggtttaggattttacgtgatttccctacatattatttgagggagaaagaaattttgaagtagtgactaaaacctaaataattccctacatatgtaggtgttagtcaatttatgcatgatatgtaggaaaggttcctacaaggagtttactggatattttcaataacttaaaactaccattgacggtgggttgttattctagaaggattgaggatttatccatggaagtgtgtactaatgccgattattcgaacttttgtattgtaactagtttcattcctacttattgctcttgtaaatataaattgtttttattcttttacctatacaaatatagcttgctaagttaaaatcagttaagcaattcccttaaatgttgtctattgtttagggtttaggttttaaatataatttgtaattatttagattatatatttgtaatgtaatttaattttaaattattaaattattaattattatattgtttaatttatattaagatagtcatacatggctgattcatcatcttctgcttcttcacggtctggatccaatcatgagggtgagggaagagatccgacgaccatgttatgcctagcacgtgtaagtggggggttttgcggaggcgtacccaacgaactcacgtttcacaggttgtgtggaacaaggacaaattttgagtgttaaagacacgacgtggtaaagtcgtagggggcccagactgtgacgatatacctgacattgttgcggtgatgttagggtagactggattcctacatgtcccacgcatgcaacatattcaggtataaaattatgaattgaacaattgtagatacaaattcatccctaaaaatgtttttgtttataagtgtacatacgaattgattatttttaacttgactttatatcaatcctgctcttatcagtgctctgattgagaggtggttacacatacatttcacatgtcacagggagagatgaccatcacgttggaagacttggttggtatcttaggtttagtcagtgacaacaatgtcgtcaccagagtcacatcagacgagtgggacaccatcatcgtggacgtgtttggtcatcctccccaggaaggtgagctaaaaggaggattcctgcgcctgtcttactttgataggcattatgcgcattggggagaggtacctggggatctagtagaagtcatgcggtttacgaaggtgcacattgcgcgtatgattggagcattgctactgttccggaaataccagaatagagagataaaaagataaaaagctattcaaatattcaaaatccctccatcttatctacaaggtacgtgataatccctatttaaattaagataattatttatcattatttattaatatcttatctccgagattatctataagtcatggcccagagcccataatccactataaatacaaccttcaggtaaccatcaggtacacacttttctagctctctcttttcaatacacactctgcacacaccccacgtccagattgtggtgtttctccctgcaagtgtgatcttcttccctgaggtgttctttcaccatagacatcttcaggagagagagagtttgatcccatagcaagatttccagcaactctctgttggaaacatttccgttcttctggaacggaacattggcgccgtctgtggggacgataaatttcgattcccatccatcatggttaacacgagaagtcgacaagtcgacggaagagacgaagtgagggggaacccggagaatgtcataatagaggatgcggtttcccacaccgcctcatccccagccattccgacaccgcggcagcccgccgccaatctgttatctggcggcgaagaggcaccaaatacgacgcagataatccataactcattgaactcaattgtgactagaattgagaatttggaaataagatatgagcttcagcgacaagaagacattcggaccatgctggcccaatttgaaaaaataaggcaagggaaccacgaaccacgacaggcatagggatatcagcatagcgaacctcagaatgaggcatttcggcaagggaattctatcccaactactggacaatggaactcggattcgccggaccacttcgggccgagaaggacaccccgatctgacggacatcgggtcctgcaaaccgagatccaggtcaacgacgcagaggagaaccaagaaaaagaggcagtgctaatcgggaaagggacataccagcgaaagtaccgccaaggtcagcaaaataacagcccgtttgttgacgcagtagtaaacgcgcaattcctagaggattttgatggatcgttcctcacgaaatacgatgggagtcaagatccttaggtacatcttgacgagttcgatatgcaaatgtgtgttcggggtatagatgagccaatcatatcccgaatcttcgtcacaacattggccggaccggcacagacgtggttccacaccctgccgccgagatcaattcggcacttcgaggaccttggtcacagattcttgttgaatttcgcaaccagcaagaagcaaccaaggtctaaattcaccttaggtaaaatacgtcagcagccaggggaaaccttacaaagctaccttgaccgattcaaagaggcacctctacaagtccaaggattggaagaaagagtgcacgttcacctcatatcagccggactcaacgggtcatcacgcctagccaaatccatttataaagaccccgtcaagtctctcctagaatttacggcgagatcgaagaagtacttggaattagagcagatggaaattgccaattcaggtcataaagaaagcaagagaaagccaacgccgccaagaaacagacatcaaggaggaatgcaccatggccgaaatcccccaaacactcatcaagggcgacctcccagaaactttcctgatctcggaagaagatctaagtacgataggtatgccccattaaacacttcccagacccagatttggagagaagtggcttcaactgagatgaagaaagttgagcgacctcggccaatattcaacaaagcaggactggatcattcccggttctgtgaattccataacggcccaggacatacaacggagcagtgctgggatctccgagacgccatagagaagttcattcgtgaagggaaattgcggcagtatgtcatcaaaacacacggccaacgaaacaaaagaatacaccaagatagtgaccgaggccgagataagaaaaagaacaaaaaagatgacgaattcccggagcccgagttcgaatgtaacatgatctcgggatctttgggtggaggcggagatacagccaatcagcggaagaaatatctcaaagaaataatggcgataaaaacccagccaagcttcaagaggaatgcaaagaaagatcctcccctgatatactttactgaggaagacatgataggagtagtacctggccacgaagacggcctcgttataacaggaacgttggccaacttccgggtcaggaggatattcgtggatagcggtagctcgaccgacatcattaatctcgaagcgtttaagagaatgaacctgaaggaggaagatttgagaccctgccaaaccatgctgtatggtttcaacggggagggcaccagcctaaaaggcatcatcgatctacagctcactctgggaacaaaagaaggcttcaggtcgaaaagggtcactttcactgtggctgaatttccatccccatataacatcatcctgggcagaccaactctccacaaatgggacataatgatatccacaaaacaccagaagatgaagatgatagggcacctcggccaaatcattacgatatgcggagatcaaaaggaatccagacagtgctactacaacactgtcaaagagaacagcgaaaatcataattctccacctcggataaaaaagggagatccagcggagtgcaaggtcgaagagccatcatctaggcaaccaatcaacctggtggaattagacgtaagggacgatgaatgaagatcagaaccagtggacgagctggaagaagtccaaatcggagattcacctaacaagatcacaaagataggcaagcagaatgatccagagacaagaaacagattactagaatgcataaaaaagaaccaggatgtgtttgcctggaaggcttccgagatacctggaatcaatccgacattctgctgccacaagatatctgtgtatcccggctccaaaccgatagaacagaagaatcggaaactcggcccagaaagaaaacaagccctggataagcacattaaggaattattggaagctggcttcataaaagaaatacaatacaccaaatggctatccaacgtcgtgatggtaaagaaatctaatgggaagtggagagtatgtgttgatttcaccgacctaaacaaattttgtcccaaagattcatatccaatgccgaatatcgactagttggtagacagctcagccggattccaactgttatcgtttatggacgcttattccggatataaccaaataccgatgtacccggaagaccaagataaaacaacattctgaggtattaatgccaattactgctacaacgtcatgccgttcggattgaaaaatgccggggtgacttatcagaaaatgatgaacagagtcttcgccgaccaacttggtcgaaatatagaagtgtacatcgacgatatgatcactaagactccagctgaagaagaccatatccgagatctggaagaaacgtttcagaagttgagacagtatgatattcgattaaatccaatgaaatgtgccttcggagtaaaagctggcaaattcctaggtttcatgcttacacacagggggatacaagcaaatccagataaatgcaaagctatcctaaacatgaaattcccagccaacaaacgcgaaatacagcagctgaccggacggatggcggcattgacaagatttcttctgaggtcagctgagaaggctctccctttctttaaattgctgaaaaaggaagccatcatagaatggactccggcgtgtgaagcagcatttctggagatcaaagaatgcctaacatcccctccagtactgtcaaaaccagaccccggagaaattctatacttatatctctcagtaggggaagaagcagtaagtgccgtattggtcagggaaatcgacaagtctcaactactggtgtattttgtgagtcggacactcaaaaactcggaggtacgatatcagaaactcgaaaagatagctttcgctctcctgacaactacaaaaagactccgtccttatttccaaagtcacactgtgatggtgagaacgaatcagccgcttcggcaaatattacataagcccgacctcgcaggaagaatgatgaattgggctatccagttatcagaattcgacatcaaatatgaagcccgacatgcaatcaaatctcaggcattagccgacttcctagtagagttgaccccgacttcatctaacgcacctgaaataccgatatggaagctatatgtcgacgaatcatccaactccaagggcagtggggctggaatcattattgaagatcctgaaggagtgtcggtagagcaatcactgtggcttaactttccgacgtctaacaatcaagccgaatacgaggccctgattgcctgcttaaaatatataagagaacagggggcactaagagtcaaagtgttcactgattcgcaactcgtctcggcacaaatagatggaagatatcaggtcaaaggaccgttgctagctaaatatctggctaaagcaaaagaaatgatcgccgatttcgaagaattgatcgtcactcatataccccgagaagaaaatacccgagcagacatattgtcaaagttagctagtacaaaagacgccagaagtcacagaaccattatccaacaagatgtggctcaaccggcatgcgtaatgatcatcgcctcagccacagaatggagaaaacctattattgattatctagagcaaggaactttgccggatgatgagatagaagcaaaaagattgatctgggaagccgccatgtactccatcgtcaacggagagttataccgcaggggccttcacaccccaatgttgctatgcctaaacctggagcaagccaaatacgtgcttaaagaaatacacgaaggcattaacggtcagcatatgggcgccagggcactagaatcaaaggtcctccgagccggatacttctggcctacgataaaaaccgatgccacgaaacatgtaagaaaatgcgatagttgccagaagcatgcaaagatattatggagcccgcccactgaactgacatcaatcacgacaccttggcctttctataaatggggtatggatcttctgggaccattcaaacccacagaaggtcaaatgagatggttagtggtagccgtcgattactttacaaaatggatagaagctgaacccatagctaccatcacttcggctcgaattcagaaattctttgagcgaaacattattgcgcgattcgggatcctggcagaagtgatcacggacaacggcacatagtttactgataaaaaatttcagcagatgatgagcggattgcatataaaacatcacttctcttcggtaggacaggccgaagctgcaaacaaagtcgtcctagacgggctaagaaagcggatgcacgaagccggatcaaattgggttgaacagctatactatgtcttgtgggcatatcgaaccacgactaaatccaccaccctagaaaccccgttcagaatgacttacggatgcaaagcgatgattcccgtggaaatcggccaaccctcgtggagaaaatgtaacaccccaaaattttggaatcacagtcaaatattggggtaaaatgttaactagagacagtacagaaggatttaagggaaatgacgaaaatacccttggacattttggaaatgaccaaattacccctaggtattttagcaagatatcttaaggaggaaattttataaacactctgggatgcttgaaaattgatctaagcacccttagggtaacaattacagagtttcccggaatattttttggaaatgacgattttgcccctaaggtgagtggcaaaattaccaaaatgcccctaggtcaaaaactgaccaagatggcctcaaaaattaatcggaacctgagaatagtataaaacatttttagttaaccaattattagcaaagttgcgagcagagaaccccaagatagaatttctacgaattttggaagttaggttaaaaagagcttaatctagactaccctaggtatcagaaaattatgagaagggtatgaatataatctatgaaattttctcttaattatggaaggaataggtttcccaaatgagttaatttaataattttattaattaggaataaaatggaccaataggaagcaagaaaagtcagttaagaaaataaaggcataaaacactttatcttaaggccatttcatgtgagaaaaaaaaaacaaacaagaaaggagtgttctacaagccataaaatacaacgtacaaagaagtaagaatagtcaaagaatgcttagccaatcaaataaagcctagtagaaagatagcaaagatagcattaggaagatatttttttaagaaaaacttcctcttgactcttttggacacagaggaaattctatgcattatctcaaagatcccaacggtcaaaagctagacatttaagttaggaatatgcctttaaaattctaagaagatccaacggtgaaccaattcaggatgagtattttattaatacgggttttggagcaaaatcaataaaaaggaaaccttttggtacaaaaccaagcatgctacggtggggaggaagaaaaaaacgaatcttggtagcaaaatacaatgaattccatgtaaaaggaagccaagtcaaggaggggagaccaattcaaagaagaaagaaaaagcaaaacatgtattattggaaccaaggcttgctacggtcaaagagaaaagaaaaaaaaaatccaatagccctttgcattatacaattacacgtgaaatgcaatcagaagtgaaggggaagggccaaatcaaatgataaaatggaataaccaattaaaaacaagcatgtggaaagctaaggggaccaaaggaatcaaagcaataaatgccaaagcatattctatcaaaggaagaagaaaaatctacttggtcttatctcattgtgaccgtgcagatttttaaggatggggggccaagggatttaagttccaccaatagaaatcaagcttggctataaaaagggagaaagtgaagcaatttggggtcagccgtgcaattgcctattaccccacttgtttgcctttgttgactccttattgaatccaaaaatttaggaagccatccgtgcagctattccaattgagccacttgcttttgtttttaattgagtgaattccaacaaagcattcaaccgtacccaccttatatcccttgtgctatcattttcacaaatattcttcaaggcaaagcaagtctacatgggggggaaagaagcaaggaacagcttgttcaatttgtggaaaaacacttaaggtatggggaagttatggtaaactaaatttaaatatgaacctctactcaaagttactacctagattaataaagatttgagtggataatttgggataatggaaaaagaattaagatttgtgaatgagactttaagcttaaagatgaataatctaaattcaatccaaagtaattcataattctctatttgatgtttaaagaatttgatttatgtttcatgaattcgtttggttatagatagtatatacgattcttgaacaagtttatttggtaatctttcttcaaatctacttattcatttaactatgtatcttgttgtttacatatttgtttaatcatatactttgtttagttgtaatgtttctttaatcttaaatattctttttatttattttgttgattgattataaaaccaaggaatgttaagtaaatgattaagggaattttatttgatcttatggatgatgacacttaccaaccaagtttaaaataaaaactctatatatatataatgataatgttttaaaactcatatggtttcatggattatttggtagatagcatatattctatgttctttaagttatgttattatctaacctatttcttatgtaattattttgtggttaattatggattacacgaattttggttaaataaaataaaagagaaataactttctaattttgttacaaatgaaaggtttcaaatgaaatttagtgtgatgacattgagttgtgatgaaagtaatgatataaaagacgtaggatgattcatgattttgatgatgagaagtgaattaagagatgaacctatgatgatcttgagtttgtgataactctgtgatgttgagtttgagactgtgatgatgacctgtgatgttgagatgagactgtgatgatgatttgtgatgttgagatgaggctgtgataatgatctgtgatgttgtgatgaaaataaaagaacaatttaaaaagatgaaaaatgaatcattcatgcattttcatgtgcacctacccggtggggtagaatttgagacgatcctcgtaaagaggtgtatgtgtcagataactaaactgagttccatacgtgtttttaacttgggggtagttgagacagtggggaaccacaccaccatgatgatcacatggatgggagtgagactcctacgcgacactgggctaccctgacgggatggataggttcgttccactaaggtgagggtggggttatctgacagtggccacaatttttgagatgttgctgagatctcagtcatgcatcatataatgagatgagcatgcattcttttgcatttcatgataagtatttgtgtgggaaaagatgatttaatacatgtgatgagcaaataataattaaattttagtaaacgtattaaatatatcctctgtattttatataactagctacgcatatttaatattatgtctgtttatatttaaattttgtttatcatgacttaccctattttgtgtcgtgtggttgacacctgtgatgaccccaaatgatttgggcgagcagaggaacagtgatatggatgacgtactagaagatgcgatgaagattttgtgatgattctctgcttgttgatgatctctactttgatctgtattatggactgtttatgtattgaactgtgaatttgtaataatggactgtatggtatgaatatgtgaacgtcatgaactacatcatttaaataacgcgtaaacttttatgatttctaaaaccgttttgaaaattaaacgaaaattcatttggacttttattctttctgtttttggagaaaaaaaaaaccccgtaattttataaaataaatatgaaataaagcaaagtagaagcggtcgtttcaattgtggtatcagagcggtcgtgtggtcatatacctttttagatctatgggaaactaagcccactaccctatgaatgatacctgtaagaggttagtaagttgtaaattcataaatgaaccataaattaagtgatcgatagaggaagataacaactagatagacaaggccaatataagacattacagaaataagacttcataaacaaaggatcaagaagtgtcaattctggggttctcttttaagtggcaaagtgtatgtacaaaatgagttgaactatctgatgtggatttctaacctcagattgatatcttttgcataagaagatgaaactatagtgaatgtttcaatcccgaatataaatgctgatcttgagacatctctccacatgattaaatcaactgaagagtgacactggtgaacacttggtcatgccagcattatctgaatttctggaattactttctctacacacacacccaaatccttgaaatttccatcactatcattcttaccattgtcgataacaattctgctagatccaccagccaatccatcattccttgattcatccaaaacatgatccaactctgctttgtccttcctaggttgtattacaactttttatctgaaatatgtttttttaagtctatacttcaactctgaattctaaagataagggtatctgaataatgggtcagttgccttaagtcctgtccccactcattagcttgtgtgactgttgcctcccaacagatacgacgggattgaacacgcccaaataggatgtgactgaacaggccaaatagggcgtgactgaacacgcccaacaaataaatatttatagtgacgcctaatttaggcgtgacagagaggggtgtcacacctaaatttgggcgtcattgacccttatataaggcagaccctctataataaccttgggtaaaaaaaaaaaaaaagttactgtagcagttactgtagcccacgcttgaggcgtgggaagccacgcctggagcgtgggaactgctccagaaagtgaattttttgctggaatcccacgcttgaggcgtgggaagccacgcctggagcgtgggaagtgttccagaaagccatttttggctggaaacccacgccaggagcgtgggaagccacgctggaagcgtgggaggcacggaagaggcctataaaaggccatttctcacgtttttgaaggccaaattcactattcctcttcctttttgagccaggcagccattagagcactctagaagcttcatatcttcatcataatccattaaaacacctcctaatcacctctaaacttgattagaactcttgagaagccaaaatccagccttattggtgagaattgagagagaaacccctttccctggagtttttggagaaattaagcgttggagaagcaagaagctggtttcagggagacagagcttagggacaagacttctccagcctttctttgttgatttgaggtaagaaacctctgttttaaccgtttaatttgaaaaatggggatttgatgaatagtaaccaaatattgatagggctggaattaggcttaggttctttagagagatgtaatcaggagagtgttctgagccatatggcatgttgaaactgaaattgtgatgaagtttgagtttggctctgggaagggagaagtgtgtgtgaatgagctatgttatggcctgaactaacttcaggacctttacaaaagttgttcatatggccaaataatcggtgaaaacgtggttatatatgcgttttggctagatggaaataatgtggattcttgattctggtataggtttgagttgaactgtacagagttctaaggggactctgaggctttggtaatgctgaggcagaccaatgagggtccatgtatgacctagtgagagctgggccaagataaaccttaggatagcagattttgcattgattatgagtggaaggtgtttccttccatataaacggttgaataccatttctgactattagattcatgcctactgtagggcgtgaagtgcagcttgctggtagagctcaccacgagactaggggagctgattctgaactgagaccaggtaagctcagtgttttcagggaatgtttccctacttgtgtttcactatacccaacattgggtgatagtttgatttgaattgtactctgatgcctattatgctatgatatagatcatatattgaatattgatgagatgatttgatgatggctggcaattgcatgctagctaaaccctgggatggggtgattacttgatgaaccttgtatgcatatgcattttgatgatgtgatcatatatatctgtgtgttgattgctgatgatatggtttgatggttgctggcaactaagtgctagctcggccctgagatagggtatgtgcttgtgttactgcactgagatagtgcatgttacttgattatgatgatgttgaggcataaattgattgtgatttgattgttgtaatctactggccagtagtgtgaggtactatggaccccattgggaatgtgcccttaagtggatgatctcccttgggataatccataggcgtccatgtaaaccctgaatagatgtgcctttaagtagatgatcctattcaggtattgggcggcaagtcctggatagatgtgcccttcagtggatgatcctatccaggcccagtatgtggttgttgttgacatatgatttattgatgctgctatgagttttcagcttatgttctgagattgagaatttaacaaatgctagtgtacttgatgagattttctgtgatataatttctgtttccgttatgatttatgatatctgtatagtgatgttatgttctgggaagtgaaccagggggagggaaatctctgagaaccctgagtttactgagataattatctcaccccgtttggggccatgttgcaggtaccgagactaccgtccctgaaagatcccaaggcaagaggcctgagatgggatagagtgaagataaccctaggtttagatgactgagcttgctagctcacttttgattattttttttggatgtgttttgataccctgaggggtcattgtatagttttgagaaaattggcttgtatataacagtaattcaccatatttgtataaagtatgtatattatactagatttatgcttcctttactattcatttttccatgctgctgcgttactttgatattgtataatgttaatacgccgggtgcacacggggtgttacaccctcccacagaacatacctccacagacgaaattcaatctaaatactatggtattcttaggagaaacaactagtcagaccattggtaactcaaaattagcattcatttttccaaatggatcaatgaaacacaacgaaacaggtgtttattttaaatgtcctactccaataccaatgcgggttcataatgagtgttcttttcagaccctcaagagtaggatgtgcgtgataaacacgttgtcgacacgcaccaaaacaattttactaagttatttctgtagcacagagctaacctaggtcgactcagagacacaatcaatatgattctagcttcaatttacgaataacagtaagggggaattttatcaaacagtttgtgcgcgtaagtaaaatttgcaaaaacgaaaactaaaattaaagagcaacacagaaattaacaagattatcaacaagtgagtaaaacagattagagaagcatcaatccaattcaccaaaccaagcaattcgaatcatcatcagtctcagaattttatcctatcatgaacatccattcaatctcattagaaattgttcaatcgaattaacccctaatttaattgaaaccacaaccctaattgaaatatcatccaattattctgtgattaatattcgaaattaggcatgaatccataacctaatccgctttcaatcctaaacgcattcataatcatgaaaaacagaatagcaattgaaaaagaagatgaacattcaagtagaattcgaaatactaaaccagaactccaattctccttgtgccttggttggcttggattagttggtgatttagccttccatgatcatcatcaatgaaagtcccatggattgagtgcacaaaaatggaagaacagaaaaacgaaaatgaagaacaatgaagaacagtagagagaaaatgagagcaagggttttgatttaaaaactaaaggaaagaaaaataaaaattgtttattgaaatgtaaagagtggttcccaagtttcactaaagtcactaatatgtagtgactgagttctgaaaacgaaatgggccacaaacaagcccaacaatctaattatttgctatttacaaccatgaaagtcaaattcgcagcccaaaattacaagtgcagaggcgctaacttcgaagcttaaaatgaacctctaaatgacagaattggcctcgggctatatgtagcaaacttgtagatcttttcgttatctttccagggactcctacaacgctctattcggagatcggtagcaccctataggtcctgcacaagtcagatacgtcaagtgagccaaaaaatccaaaaatacgcaacaattagcaattaagcccacttacttgcctaggccaaaaactgaattagaataggaaaataaaggtccaagagaggtcaaataagctaagaaggatagaaaaatactcaactaagagcactctatcaaaataccccacacttaaacttttgcactcctaggaaaaactaaaagaaagactaagagaaaaattcaaactaaagtaaaccaaaagtttaaagaaagggtatgaacaaggcacacatatttttcaatggatcatagcaatgcacaaaagggagagagatgaaagatggaagaataatattgaggtaacaaacaatccatgaaaacatgaccacaaattacaaagtgaaaaagtagtcaagtttagagtcaagaatgcaccaaggtgatagaattctctcaaagggtggcactcaacctcacatgatgtgtatgacttgtatttacactcaaacaccacatgcaactagcatatccaagcattgacaaacctctcattcattcaacttgaaatacacatgcatcaaaagatcaaaaggactttattagcttgtaatgaatggcttagggaaaggtggataagaagaggatatttaggctaaagcttaagagaaaagagggacaatggggagcaagccaacaaaataaaagaagggtagaagcaaggtgaactttgaaagaatttacaaggatgaaaatgaagtataacaacttttattgcatatatatatatattttttttcctttgcttgaaattcttttttctttgcttatacacaatttttttctacttttcttctttttcttctttttcttcttttccttgaccttttgctatttgaactctttcttttctcttttttcttttgttttctttcaaaacaaaacaaaagacaaacaccccacacttgtttgaatcccactcccaaaacaattccaaagccccttttctccctaaagctagggtaacatggttttccattatttattttttttgtttttaatgggctagacaagaaagaaaaggctaaggctcaaagagggtgacaatggatatcaacacaaggataggcttatttgactagtagctaaaagaaagaaggcctaaatcatctcaatcaaagcatgtgcaacaaggaatgtcaaaagaggcaaggcaaaacatagagtaatctagcacaagggtgaaatcacacatgaaagaacatattcacaaaggctcaaaactcacaaggcataattctaccacacatggttcatcttaaattctatttttcaagcctacttatcacttcaacaattgcaacaaagattcacatcaagtatgaaacctctcaatccaaccaactttttaatatttctcacaatttatgcaaattagaaatcctatgaaaaacatgaaaaatgtgcctaaactcaataaaaacagcaacaaacagaaacaaacaacaaaaacatacagactcaaaaactaaaacagacaaacagataaacagaaaacagacattgacagacaaacaggcaaacagaaaacaacaaaattttaaaaattttaaaatgcacattgtcctcaatgtaagcatacaaagaaatgcaacaaagagacaacaaataaaagaagggaaaaggaaactccccaaatgtcattcaagacacatcttcacacaaaattggtaggaccaaagagatgtcctccacaagctcttcctccacttgagggctctcatgaaatgctttgagttggtgaccattgaccttgaagactttgccggtaccttcatttttaatctcaactacaccatggggaaaaacattagtaataacaaaaggtccatcccatctagatcgaagtttaccggaaataagcttaaggcgagaattaaacaataacactttttggccactatggaactcctttctaagaatcctagagttatggaatttcttcactttctccttataaatcttggagttctcataggcttccaaacgaatctcctcaagctcttgcaactgaagcttcctttgcatacccgcttcatcaaatgccatgttgcaactctttaccgcccaataagcacggtgctcaatctccactggaaggtggcatgccttaccgaaaaccaccctatagggagacatccccagaggtgtgtggtaagtggtcctatgagcccataaagcatcctcaagaagcttgctccagtctttcctgtttgattgcaccaccttctgtaacacttgcttgatctctctattaaaaacctctttttgcccattagtttggggatgataagctgtagcaactctatgcacaaccccatacttctgaagcaaggatgcgaatgaccggttacagaaatggctcccctggtcactgataatggctttaggcacaccaaacctgcaaaaaatgttggatctcacaaaatccacaacaactttagaatcattagttctggtggccttagcctcaacccatctagaaacataatcaacagcaagcaaaatatatgaaaagccatgagaaacaggaaatggacccataaaatcaataccccagacatcaaaaatctcacaaaagataatgggttgctgaggcatctcatgtttatgtgtaattgtgcctcctgctctctgacactgctcataagtggtggtaaagtgatgagcatccctaaacaaggtgggccaaaagaatccacagtctaataccctcctagcggtcctctgaggaccaaaatgacctctggtaggtgtgccatgacaaaactgaagaatagactgaatttcatgatcagacacacaccttcagatcacttggtcactaccaaacctccacaaataaggatcatcccaaacatagtatttagcatcactcttaagtttagctatttgggacctagatgcattaggtggaacaacaaatgcaacaaggaaattaacaatgtcagcaaaccaaggtgtaacatgcgatgaatgcaaatgcatcaagtgctcatcaggaaaattatcacgaatgggaaaggactcaagaggtccttcaatcctgctcaagtgatcagcaaccaagttttctgcaccacttctgtccttaatctcaatgtcaaattcctgaagaagaagcatccacctgatcaatctaggtttagcatcaggcttctttaacaggtatttcaaaactgcatggtcagtaaagacaatgatatgggagcaaagcaattaagatctaaatttatctaaagcaaaaacaatagccaaaagctccttctcaatggtggtgtagttaacttgggctgcatccaaagtgcgtgaagcataagcaatgacataggatagtttaccaactctttgggacaatacaaccccaagtgcataattagaggcatcacacatcagctcaaagggaagctcccaatttggcggatgcatgatgggaaaggtagtcaacttcttcctcaatccctcaaatgcctctttgcaatgctggtcaaatgtaaagtctacgtccttttggagaagcttggacagtggcaatgcaattttactgaaatcctgaatgaatctcctataaaaacctgcatgtccaaggaaggaacgtacttcccgcatagaggcggggtaaggcatcaaggtaatcacatcaatttttgccttatcaacctcaattcctctactagagaccaaatgtcctaggactataccctcatgcaccatgaaatgacatttctcaaagttaagaacaaggttagtgctaatacatcggtcaagcactctagagagactatccaaacatgcataaaaaaagaaaccatacacagtgaaatcatccataaacacctccatgcaactctctaataaatcagaaaagatgcttaccatgcacctttgaaaggtgccaggtgcgttgcataggccaaaaggcatccgggtgtaagcaaatgtgccaaatggacaggtgaatgtggtcttatgttgatcctctggtgcaatgtggatttgcatgtaaccagaaaaaccatcaagaaagcagtattgtgatttacctgccaacctctctaaaacttgatcaatgaaagggagagggaaatggtccttacaagtggcctggttaagtctcctgtaatcaatgcaaactcgccaactgttggtcactctagtcggaattagctcattattttgattcttcacaactgtgagacccgacttcttaggaagcacttggacaggtgaaacctaagtgctatcagagatgggatagataatccctgcagctagtagcttcgtcacttccttcttcaccacataaagaatagtgggattcagcctcctctggggttgcctcactggtctagaatcatccttcaaaagtattcgatgcatgcagatggagggattaattccaggaagatcagcaagtgtccatccaatagccttcttgtggccctcaagacatgcatcaacttttcttcatgctccagtggtagactactagatatgatgactgggagcttctgagcatcatttaaatattcatacttgaggtgctcaggtagtgacttcaactccaaggaagggggttgaatattggaaggtaagggaagactagaagctgaggaaagtgggatagtaggctcagaacttgtatctgtacctggaacacaatcagagtgaagtgcggaggaaatttccacacaaatgctacacacagcagcagaatcatcacaggtacaattacaagaaccaagatcaaaatcggaaaagttggaagaaagatcagaaaaatcagaaagtaaatcagaaatatctacgctatcaactgcagcatcaatgatatcaaggagaaaaagaaaatgctcctctgcaggatgtctcatagcctcaaaaatgttgaactgaacaatgtcatcaccaaactccatagaaacagttcctgcatgcacatcaattttagtctttgctatcatcaagaatggtctccctaggatcaaagtgggaccatggctgggagactcattctccatatccaatatgtaaaaatctgctgggaagatcaaattattgacccgcaccagcacatcttcaataagttcaagtggaagtgcaacactcctgttggctaagtggatgacaacaccagtgggtttcatctcaccaaggtgtagtgctctataaactgatgtgggcatgacattaatggaggcttcaagatcacacaaggcatctgcaaaagtgatatctccaatggtgcatgggacactgaaagtgccaggatccttgcacttctgtggcaaggtggatagtgggatggcatcaaccgctttaccctgtatcagtgcagaaactcttcacttgctcatttcccttaagcttcctcttatgggtgcacaaatccttcaagaactttgcatattttgggatttgtttgatggcatccaggagaggaatgttaactttcaccctcctgaaagtctcaagcagatcagaatcaaggtccactagtttctttgcaggaatggctctagaaggaaaaggtaagggaatctattttggtgcagaatctgtcttggcaccatcatcaacttttttaccagcatcaattttagcaccagcatttggaagttccgtgccactcctcaaggtgatggcactcacattctttggattaacaactggttgtgctggaagattaccagaaccttgctgctgcatctggttgacagttgtagctaactgtccaatctgagtctgcaggtcctggatggtggcactgacattttgctgaacctgaaggttgttggtggccatttgcttcattaaatcctccaaagaaggtccagaactagcctgcacaggttgtggaggtgtaggtgtaggtgaaggtgcaggttgctggaactgtggttgttgtctaaaaggaggaggttggtatttagtagtggcaagctggaaggatttttgtggaggtctaaaaggctgttgttgttgtgggccaggaccatacctcaaatttgggtgatctctccaaccaggattataagtgttggagtaaggattatactgttgttgaggtctaaatgactggccaggttgcatggcagagacttcagcaggttgttcagtctattggagagtggggcatgcatctgtaggatgatcaggggcacaacagataccacaaagccttggttgattggctgccatcacagtctgttgttgcccaatagcaagctgcctcacaagagatgtcaactcagtcaatttgttctccaatctctggttatcagcaaccatagagacagaagcttcatttgcagccatcaccttagttgttgtaactctagcaccaaattgttgatagttggctgccatgttagaaatcaactgtcttgtagcaagaggggtcttgtccatcagagcgcctccactagctgcatctatcatactcctatccatcaacatcaatccttcataaaaatattgaatcagtaattgctcactaatttgatggtgaggacaggtagcacactgccttatgccacatatttcctttcggatggatgttgttctagaggcagggaaggatttctccaaaaatcttctcttcatgtcagtccaagtggtgataggatctggttgaaggtacaaccaatccttagcaacaccatccagagagaaagggaatgtcttcatcttaacataatcctcatggacatcatgtgggcgcatggtggaacacaccacatgaaactccgtaaggtgtttatgtggatcctcaccagcaagtccatgaaatttaggaagcaaatggatcaggccagatttcagctcataactgacctcagtctcagggtattgaatacaccaaggttggtaagcaacatcaggtgtagctaactccttaagagttaggttgttgttagctatgatatcaagatgtgtagaagcagaaggagtagaagcagattcagaatcaaagtcagaagatactacactactgtctaaaactacactatcaaagtcatctaacctagggttatgtctgtgtaatctgtgaaatgtcctatctatctcaggatcaaatgaatataattcacttgatgtagacctagtcatacacagttcagatcataaggaacaataaacacagacagcacagaaatatcaaacagctaaactgccaggacactaccaactatatatgctgaaatgaaatagaaattggaaaactgccctaaatttttttgaaaaaatctaaaaaaataacagtgaatgcctaaaaatcatgattgatttttttgatttttttttggtgatttataaaaatcatgaaattagaaaatttcctaaaaagtggtctaaacgatgtaatttggcgatttggaccatagtttgctgtgaaattaccagaatgcccctgcgacaattgtaaaaactggtccaaaactccaacttagagttcgaatttgccaatttgaacccacacccaacccttaaaagggttgcttttgtttaaaatgggggataaaccttggggaacaaatcgcaactcaaactgcacaagttggaaaaattttgggacagcaaaatgatactacaaaaacaactacactacactacactactttctccctactactactctattttttgctctggtttttactgttttctttgtttttttgacagcaaacataaactacatcattcatgcttcataatgcacaacagcaacaatgcaaatatgtgacaaaatgcaattatgcaacagaatgtcaatatgcagtgaatgtatgcaaatgattatatatatatatatatatatatatatatatatatatatatataactactactatgaactatttacagcaaattaaagctagcacacaatgaaccgtgtccccggcaacggcgccagttttgataaacacgttgtcgacacgcaccaaaacaattttactaagttatttctgtagcacagagctaacctaggtcgactcaaagacacaatcaatatggttctagcttcaatttacgaataacaataagggggaattttatcaaatagtttgtgtgcgtaagtaaaatttgcaaaaacgtaaactaaaattaaagagcaacacaaaaattaacaagattatcaacgagtaaaacagattagagaagcatcaatccaattcaccaaaccaagcaattcgaatcatcatcattctcagaattttatcctatcatgaatatccattcaatctcattagaaattgttcaatcgaattaacccctaatttaattgaaaccacaaccctaattgaaatatcatccaattattctatgattaatattcaaaattaggcatgaatccataatctatctcaacacaatttcctgagaaggctacatctgtgtatataggaacatctccattcgggaggctacatctatatcacaggaacatctcacaacaggtcttactcaatctcatgtcatctatcctactaccataggattcaattcattcacaaaattcacattcaattttaatagtccatcatgcatctcataatttcacactccattccatgcatctcaaatcaacacctatcattcccccatcacagggttcaaatcacatttcaagcatctcattcccatacacatcaattcaacaatcaattacacaatatacaatttccatatacatgtatttactcacatcaaaaccatcactccttctggagcataatggaacacagtaaggatatacacacaagaaccaagagcttacctgctctaggcaaaacaccggctcccccggtctcgtggtcaccaccacccgaactatcaagctcacgtcctacataagagtaaatacataacgtatcagtaacggtcctaagccgttaaaacgaaaggaaactgtaatcctttccacgtaacacataactaatcacttcacaagtgattctcagaccctcaacaggatccctctcagcctactcaaggctccagagcctctcctaagactctgatcaagctaatataaagcatatccctgctttatccaaatcaacttcaagcttttcattataaccaattcagctcataaacaatatctatactatcccatgagcaactttatcaactgctctaaggttcataatagccaaataaccagtcttttctctactcatacataaactcagaggcaaaatcaaacttcatcaataatgatgactcaaggctctaacttcatcagaacaaccccctgaacacaactctctacagggtccaagcctaataatataatagcctagggcttttataaaaaggagtaaaagaaataggaatttaaatttataaaattctgtcgcaaaagccttagtgacagaattagcgacggatttagcgacggagtctgacgccaagagtgccagatcggcgccaagagcgccacaggtgctggaagttggcgccaagagcgccagagtggcgccaagggcgcgtcatgtcggtcaggccccctatataaggggattttgcgatttttccagagggaaccactgttcctcttcttccctgagcctggacctccattaatgcaccttagaagctttataccttcatcataaaccactaaaacacctcctaatcacttttaaacttgattagaaccattggagagccaaaatccagcctagttgtgagagtttgtgagagaaactttgagagaaccccattccttgagttcttgagagagagatgagctgtgggagaggaaagaaggaagcccaggacaccagagctaggagaaagacttctgcaacctttccttcattgatctgaggtaagaaacctctgttttaaccgtttaatttgtggaatggggattggatgaatagtgaccaattgatgatagggctggaattaggcttaggttctttagaaaagtgtagtcaggaggctgttctgagtaatgtggaactttgaaattggaattgtgatgaagtttgaatttggctctttgaggaagaagtgggtgtgaatgggaggtactatggcctgaactaacttaagtacctttacaaaagttgttcataaggccaaataatcggtgaaaacgtgattatatatgtgtattggctgagttgaaccaatgtgggttcttgattctggtgcagctttgaattgagctgtacagagttcttgtaacaccccgtaggcctccgacgtgttatcattaataatatcagtttaacgtttaaaacatagtttataaaactcagcggaagcacagaatcgcttttcttgatacattatgtatgaaacaacatcaactcatcagagtcacacacaaagcataaaagcacacccctgctgatccagtttctcataacacataaaccatatagacagatatctatcagaaataggcagatatatcactataccacagctatactcgggagaatatgtctcataaacatataagaaatagttctgtacaaatatatatcagtactcacacctcatcgggtgatacaaaagaatatcagccctcacagggtatacagaactatacaaatcatcaggagtacacacactccatcccttctcaagggtaccatatataaacaaaataatccaaaactgagcctacacgctccatctgctgtcatcagccaagcagaaacgtctctactcgggcctcctgccctgagactgctctcttcgtccagaagagtcacctgaaaagcataattccccacacggggtgagataacaaatctcagtaagctcagggtccatggaggcttctcctccaccctggcccacttccataacacatacatcaggcaatcacaaacaaatggcccactgacctggctctctggccctcataacaacataagcatagcatacaaacatggcggagctgcctcaatgcctggcggagctacctcaacgcctatatcagtgggagtccgaaactcgcacctgtgccatcccattgggtgctaacccttcgcatggatgcacaacatatggcacctccaagaatagaaggagctacctcaacttctaatcccctggcctgtgggaatcaatcccctgggagctacctcaaccaagagccagccatgctaggaggaaaaccatctcctagggaggtccatatctatctattggccaacagatctatcacagtcatatcacaacacaatatcaagcacatatgcatacatacatcattatgaggatgcaactaccaatgcatgcatcatgaaatgaccaccactcccccggagtgtggtgtggcacacaagatgggaattcatcccccagagacactgaacttacctggtaaggtctcagtcagcaattccttcccaggtctgtggctcccgccaacaacagtctcacaatcaatgcctaaccaaggcatatgcaatttcacatcaaaaccagaccacagacatgaaattcacaatatatatatatatatacatcatacagaaatcccctatcctagggttcaagccaactcagcctacactaggctgctctaagaccactcaaggtccatcaggatggaatacaatccatctgagtcattctagactcgctgcacatatacataactaagccttactcagcctcacaatttaattgttatcagaaaggggctgaggttcattcaaagccctgctctaccagcctctcagctcagagcatcacaatcaaggctctagcctatcagagaaccatcaacaagtgactttacataagtcacacaggcatatacagagccaagattcaaagttatcagaataaaaaactgaaagctaatccttcatctattctaagccctgaacaactttctcaactggaccctgagctaattctagccccagctcatatgggtcactattcacagggacccccagaatcaaaattaaacggtgaaacttaagtttcttacctcagtggcgaacccaacagcctcagaacagcttctcctagcttctatgttccaattacgctgtggttctgcgccaagctcgagttctctgagcttttccctctgaggttcctcttctcactcaaattggggttttcaaggaattagatgaaggattcaagctttctaatcggttcaatcaagattctaaggctcagggaagtgtttaggctgagaaatcaagtcctaagaagctttaggacttcaacaatggaggttggctaaagggaggaagaagaaatggtttttccttccatttctaacgttttggcctttaaattctaatctgccgacgttcccacgcgactcacttggactcccacgcgactcacttgggatggcagacagaaataccatttctaagccacttcccacgcgactcgcgtcgttttcccacgcgactcgcgccattcattcgggccttccacgcgacccgcgtggatcccaagtgactcgcgtggagccccagaaaaaaaaccatgatttctggaccatttgccacgcgactcgcgtggatcttcaagtgactcgcgtgacatggcagagccatctgccccatattacctatatggcgcgggtcgcgccgcaccccaagtgggtcgcgccatatgccagaacaatccacaaacttgcatttttaagcatctttcagaggattctaaagcatgatcatattccttaacccttaaacttagattcatgcttaaaataagcttaaacatatgcttacgaattcaagctattacatttggcgccatcagcgccaatcctggtgccaccggcgccgcacccttagcagggttttctgacctgaatccccgcgcgatcgcgcggggttaagcgccgaaaataaaagtccttacattctccacagagtaagataaaatcaactacctccaattcaatgccaccaagcctgtggcctctcccaagtatcttgaacttgactggttcattggtagagctttgctgcagagctaaatctctccaaaacctaagagagatagacttcagaaacttttagagagaaggtgacagagtaaaagtgacgaaaatgtaaaaaaaaaatccagcatataaagcaaggagacactagatggctttagatttgggctattaaacttaacaattgaatatggagggggttctgcttcctacaccagcacttttgcttatacacccagtgctgaatagtgtaataccaaaaatgcccatgctaaaagtggttaagtcatgacaatttttttccatacaccattcatatgctttcttctttcttttcttatctatcgtttcgcctccccgttccgccgtatttttcgtcttctccgcctccccattaagcaacacaaaagttgggtgttcatggttgggttgaatcatttgagttccgccattgtcctccacataagttcttgccttcatttttgacattgtcatttacgttgatttgggaaatgaatggacgttcatgggtatggattggcaatccttaaggccaattatacatggataatatggaaagcaacatacagattggcaatccataagaaggaaaacattggaaatctataaacctcatacgaattgccaatctgtatgaggtttacggatttccaatgttttcttcttacggattggcaatccataagggagagttgtattaaattatattttttttttgaaaatgtggttatttggttgaaaaaaatgtaaattattgtgtagaggtaatttggttaaaaaatgtgtaaacttggttgaaaaaatgtcaattattgtgtaatatatatgaattggagatgtgatcaacgggcttttttgtgaaaaataagtttataatgtttagtatagaagtatacatcttagttcctaccaaaataccattttagcttttcctggctatgaagcatgtaggtcgttatatatataacagtaaaggtttatttttccccatgaaatgtgatatttgtgttattttgttgattatctttattattttagcattagaacaataatttgacaaataagtacttatctgttttgttgatctattaattgcattcaaaacttgatgaagatgctgacatagcaattacacatggagttcacatgtccataaggtgttgacatgagtggtatacatggagttgacacatgccaaacacatgaacaacatgtcaacatctccattaagtattggatgacaaattaatagatagattaagataacaatttttttaaaaaaattagaccaatatcccaaaaattttaaaaaaactagatgaccaaaattgcatattgtactagagtattgtaattaagcttaattatatttgtggctatgtattttagacaatatattagtgatgaaagaattcatttttgttgcaccactaaaagtgaaactaacaagaagcaaaaatagtatggctaccggtgaagatgcatgttgtcgaatttatattttttctttttgtcatccttagtttgttaacttgaacattgattgtgatctagatgggtacgattgtattttagttgttttgatttgtatgaaaacaattagtatggattgtgttgaagttgtaatgtaacaatttggtctgaatcacagattatgattaaaattttaggattaaggcaggctttaggcagagaagtcaacaaagagcctaggggtaacgaagaagaagcccttgcacgtcgaaggccgacaacattagcatgaagacaacacgcaaggattagtgttgttgaggatgtgcctactgagcaaggtgtagacgttggtgacattgttgcacttgaggagggaagcattgacactgaggccgagggatttcctggtgggccacatgacacttcagtgttgtatccttatgttgatcatgtcgcaactaaattttggatgggagaggtacgattttatttaaatataattcgatttgacaattatatttggtgtttatatgtaggtagctaactaacaaatattataggagcaccctgagctaaagttggcatcccatgggagaaaggtgcaaaaatttggtaggcctacacctcagattgaaggtttagtggccggtacggggttaagcccacttatcacctgtttgttggagataggtgataggggtttaatataagcttttgtggagaggtggtacaaggagaccaatagctttcatctgccgataagaaagatgactatcacgctagatgacgtcgcttcattgttacatctaccagttcttggagccttccaaacctacgaagtattagatgtagaggaggctattgaattactagtggagctgcttgaggtgactattcaggaggctgaagcagagactaaacaatgccatggagcatatgttcgtttatcttggctatgagacttgtatggggtgaagtgtgagcacatgaagtggacggtggtagccagagcatatttgctccatttggtaggttgcacgatcttcgctaacaagagggccacacataccggtgtggtattcttggaggcatttctggatctacatgagtccggtggatttagttggggagtggctgccctccaacacatgtacgataacttaaactatgtatgtcaacaccacggtaaacatcttgttgggtacattagtctcatgcaggtacttttgattacatgaactagtttatttttgcttattgatcagtgttcgagttgtacataatagacttatttgtgttaactattttggtcaatgtagtgttggatatacgagcattttcctgcagtttccaacatgattgcagatgaggactacgaagaaaggcaaccactggcatgtcggtgaaggccgaggaaggcattacccgtcgcaacctatcggaggcgattagataggttgacgactgacagtgtttgttggacaccatacactgatcaccatgcattttgggactttgaagccattttgcttttcttaggttatatcaaatggggcccatacaatgtcagataccaaccggagagagtagttagacagtttggattcgtacagtctataccttgctttgtaagttgtccccccattgacaaaggaggctggtgataggtggctttacttttcgaagcatcttgcagtcactagagacaattttagtttccttggtcagtgtgatgcagactatatggagtggttctatcagattttgcacccattcatgaccccaccacagcctggggagtctgtcaaacatccttctgtcgttcatcatcatgtacctaatccaccataggttccacctgcagatgtagtaacacctacggatgtggctgatgacatccctcgacatgcattggtaaaagaaatatatattcattttaatgtcatttttaacccaaaactgtagactcttattttgagaattttttggataattgtattagggcttgtttgaaaggattgcagagaggttgtaaataattatagaccttcacatggtgactgaaggcactgaagcctatgacataacagagaagtgtatccaatatgcgcgagctggatgtgtaaatgatgatagaattgtttgcgtgcggtctacacgatcgaggcatggatagcgtgaagatggtgttagggattgatttggatttttgtatgtaacaacattaatatatacaattgtactttgttgcttttactttgtatttgttgtgcgatttatgctaatgtatacggcaagtgcaccgatcgttaacaagtaataaaagtgagtaagtgagttatcgtctccacagggattggggtaatttttacaataatattaattctaaatgactggaattaaaacagaaaataagagataattgttgatgttggatgattggtgtttgaatagaaatagaaaataaatgtagtaaaaatataaaagaagttaccaatggaagaaacaattgtggtcaggcacaatcccctttgttcctacctccttcacttgattggtttattatcttaagtcacacacatgataaatctttcctaaattcgtaaatcctagaactactagagtcataaccagcgatttaaccctttaatttgatcgagaagcctaaacccttagtgaatctgtcaaactaagtattcaaagaatatatctcatgtgatcttgttaagattattcggagaatatgcctttcctaagttagttaatccctaattccttagtgaattaaccctttaacccaattcaaaaacccaattccttggtgaattctattaagttaagcatgaaaaagaacatattataaaatccgtagccacgcatccctatgtctaggcgaagaacaactattattctaaacatgtcagaaattagaaccccaacgtgtccattgcgaatcctaaccctcaatacttaaatagaatggccaattccaatttaagagtaaaacattgaatagcacagagtagaataaaataatcaaaacagcattagaatcaataccaattcaagttacagaggagttacatcagttcatggccttcccacaatacaagttcagcctgccatagacttcaagaaaccaaaggctgtcaaataatacattcttggtgaccttgccttgattcttgacctccaaaggtttagagaaaagaaaggaagagtagaaaggtgtcagtgtctaagtgtgtctgtgttttgaaccccccccagaggcctttatttatagatagatttaattaaggtaacaaggcctattttctgttccaaatctaaatcaaatcttcttaattaaggaaactaaatatatttatagaatcacttaattaaggcaactaatcctaatataataccaaatcttgaaatatatgatttaaataaggaaactgttttaacctcacgcgagccgcgcgcgataccacgcgagtcgcgtggactggcagaaaggaatgacgcgtgtcgcgtgagttgtgacgtgcctcgcgtggtatggcagaagggaattccttatttctttgaatcttgacgcgacccgcgtgattgccaagtttgtcgcgtgaagtggcagagttgaaagggcttaaatcttgaagttcccacgcgatccacttgaataacggcgctacctacgtgatatcctcgggtcttctacgcgactcgcgcgagtaatggcgcgacacgcgtgacactccagaacttgcttcttttattatttattctcctcttttgacctgaaattgcacaattggtattgaaattagatttaaacaataaaatactaaactcaactaattctaagctatttacctaagtatttaatcaaattctaacctaaaactagactaaaaacaagatgtgtttgcaacacatcagtatttaagatttataattaaccatgttgtcgttatagttgacattggtaacaaattctcaacattttttaaatccaaattcaaaatacatacacaacaacgacattgacattaacgtcctaaatcaacataacccggaggtcacattggtatacttcgccattcgacttacataactagtgggccactcttttgcttgagaataacaatgttttgaccataataaagtagttgagggcataggacatccgtctcgcaatgaaacctgaaccaaaaatgtcaatgttaatattattcactttagtattgtactaaatgaaaggaaaaacaagttaatggtatgttatacctgagaaaaatgatttccatacacatgtccaacacaaatgatgcgatgtacagcaggatctctaggcagttagcttcttagcggaaaaaacgtcataatttgttgcaaagaaagacaaacaagaacgaggttatactgtgaagcaatgacataacccatgtcaataatatccatccatttatcctgggttacctgcatgcgaacaatgtataagtatattaaacacaaaaatatcatatacatataaaaacaagacatgaaacctttaactttgacagtccatcaacaaggagtgacctttttaactcctcaaatctttgtaacccaccaaacaagacaatatactcatcagaccattctgcaagttccttgagcaaatggttgcgtaccacagcccaggcatcttcaccataaccaagtaaacccacaataacacgatatccacagttaccatcggctttaacatcacatacaccaaaaatgtaattcctcatgcatggcagagattgatccaacattggaatattacccatggatataggtcccagaagatgttgatgtagaacgaggttgagatgtgcaactatcaccctaagaatataacgcatccacatactcaaagtacgatggatcccgcttggttgatcttttgtgtttggtaacattttcttttgagacccttttgtctttaccttttatggaggaggacatatggaagttttattaggatatgctatttctttgagtttactctttagagtaactttgccacacatgtcaagactttcaaatcgcttcgatattgcttccatctcttttgttattgtcacttcgcactcatcgacaccttggtctgagaaatgtaacctccgccaaaacatgtgtacaacacctagtggtatgttaccagcattatatttggctagctcacatgcacaaggcaaaccatgcatgcttcttaacacacatccagtacgagaactatcaacgcctacataatgaactcgctcaaactccgcagcaatgtcatttaatgcataccttgaaaccatgtcgacgagtcttttgtacaaggtaactttaaacacatgtccaacaacatgcatgcttgtctcaaaagatgcctggatttcattgtgttgcaacgtcatcatgttgttcatggcatcccaaacattacacagatctccaaggctatcctgtagtagccgctttaaggtccaatgagcagactcaaccctacagttaaagattaaaacaattaatttgataaatgtaaaaattattgaaatcataatgtcatcaatgtattgcaaaagatttacctgtttggagtaatatttccaaaatgcataactttattagtccatgtcatcacaaatctttctttgtggggaattaaccatgtgtctttcacatatcgaacaaatattggccatggtgcgcaaacacattcaaacttcataagacagtcatcatatgcattttcaaaagcacaatctacaagacttcctcatgcatccatcacatagtcccatgcattgttttgtcccacaagcattttacattttgccttgacattcttgtcaatgtgaaactgacacaacaagttggttgtgtcaggggaaacatctttaatggcattcatcagtgttgtatctttgtctgtgagaaggactttaggaaaaatatcactctttagaaaaatccctctaaatcgttcaagagcccagacaatattgttgatacgttctccctccaaatacgcaaacccagctgaaagtatcatcccagtaggtgtcacaccaacaatgtcaagcaaagggagtctatacttgttcgttttgtatgtactgtcaatgaggaataccaaatgacatgaatttatcaatttcactgcatccggatgtgcccagaagatgtcttgtacaacattttcatccttcactctatgtcaatggatatacgtatcgcgttgaagaagcttcattaattgttgcatttcactattgttgcctcttatagaagtacgatacgcatatcttgcattgtagaattgtttcattgttgtataactttcaaagttgcgatcttttaaactcagaagaatattctttggtttaacccttgactttgtcatttcaacaacaataacattctcttcctcagttaaacgaccagtatatggatgtccagtcattgacttaggcaaattgtaacaccccaaatttttcaaatcacagtcaaatattagggtaaaatgttaactagggatagtacagaaggatttaagggaaatgacgaaaatacccctagacatttttgaaatgaccaaattacccctaggtattttagcaatatatcttaaggaggaaatttcataagcactctgggatgcttgaaaaatgatctaagcacctttggggtaacaattacaaagtttcccggaatattttcaaaaatgacgattttgcccttaaggtgagtggcaaaattaccaaaatgcccctgggtcaaaactgaccaagatgactttagaaaattgtgggaacctgagtatgggatagaataccttgagccaatacattattaacatgattaggggcagaaaaccctaaacaataatttctaggaattttggaagataatttggaaaagagcttaatcgagaatactctaggtatcagaaaattattagacaagtatgaacttgatataaagaattttctcttaattatggaagggacaagagttctaaaggagttagttggataattttcataattagaagcgaatttgactaataaggaaaaatcaaaagtgtagtaaacctcctcttgactcttttggacacggaggaaattctatgcattatctcaaaaatcccaacggtcaaaagctagacatgtaagctaggaatgtgcctttaaaattatatgaagatccaacggtgaacgaattcataatgggtattttattactacgggttttagagaaaagtcaaggacattggtagaattcaagaacaattaagcataaaggataaaaagcaaaactgtttagccatagataccataagccacagtttaagggaagaaagaagcaatccaagaagttttgaatgagggaccacgtgaagaattataaggcaaatggggaagttaaagtcaaataagcatccaatgagaagctaggccatgaagacttagtcaaaagtggggagacaagaggaatatgttttaaatgaagggaatctcatttaggagagagatatgcacggataaaaggaggaaaaaggaagccaccgtggaagtgtaggaataaatagaaagaaaagctaaaaaaatataagcataagtccatttattgtgattggtttatccaaatggttgaaaagtcctccttgcatttcattggttgcccctatgactttaattgatcaaatagaatggccaagggagataaagctacggatgatctcccctttgaagtccaaaaccgtgaagattgaagagacaaaaggaataaatgttagtacttgcaaagtttggtggaaggaagccattggatgagcaattaaaaagggttttacatgataagcttacaattaataaggatgatgtaagatggacttataaaagggaccggttgtgaagaggaaagctacgggtacatcaccaattagcaaaaccatgtcatttttcatgtagcttttgaacacatattcctctcattttctcacataaaccgtgccctctcttttctcactccccttatgctttcaatccttttcaccacctaaccgtaaattaaacattcaacaacaaattgggaggaagtcacgtatggaagaggaaggattctaaagccaatattaaattagtaatccaaccaaggtgaggggagttttggtatattaaattggaatatatgcaagaattcttattagaataatttaagtttatgcaatgatattaaagaattatgttctttaaaaaggaattaagatgattagcgtagaagaaaaggggcaaataaatctcatatgaatcataaggtctgagaataattaaagaacttaatcctttttacgtagagtattttgataaagaataatttatctgttgttatattttatgttgtctgttatcttgcataaatatttttatttcataagttaagttaatttatctcccttaaattatgttaaatacgttgttaattttaatttatgttattatacgttgttaattgtaatttacgttattatgtgaaatacgttgttattcttatatctatgctattcactgttattgttattggtaatattattctatgttgaagattttgtaataatatggtgtggtgctaagatgataatgatatgatgatgacctcattatatgtgatggaattatgatgataagatgatgaccctgtgattctgtgatgagactgggatgagatgatgatgatcctgtgattctgtgatgagactgtgatgagatgataatgaccctgtgattttgtgataagatgatgatgatatgatgatgaccctatgatgtgtgatgagattatgatgataagatgatgattctgtgaggatgaccttgtaacactaaaaagatgattctgtgatgttgagaagtgatgaaaatgaaataataaattataagatataaaataaaccagtgatgcatttcatgtgcatgggatgatgagatgttaaatctcataaagaggagtgtcagataactaactgagttccatacgtgtttttaacttgggggtagttgagacagtggggaaccacaccaccatgatgatcacatggatgggagtgagactcctacgcgacactgggctaccctgacgggatggataggttcgttccactgagtgagggtggggttatctgacagtggccacaatttttaagatgttgctgagatctcagtcatgcatcatataataagatgagcatgcattttcttacgtattgtgtgtagaaaagaaatgatttaattcatgtgtggaataaaatataattaacttttaatgattattataatatgtcctttgtattatatctaactagtacgtatatttaatatttcggtatctcatatttttgtatatatttaagtttgatttatcatgacttaccctcttttgtgtcgtgtggttggcacctgtgatgaccccacattatttgggcgagcagaggaacagtgaagtggacgatggggtactagaagatgtagctgttatgattctctgcttgtgatgatctatatttagttctgtatcatggactatttttatatgggactgtagatttgtaatggactgtatattatggacatgtgatatatatatctgtgtgaatgaacgttgggtatttacgcgtaaacgtctatatgtcttaaaaagctattttaaaaacttaaccaatttaatttggaatttgttattattattattaaattcattttttcggaaaaaaaaaataaataaaaataaaagagaaagaaatttttcagttataaattaagaaatcaaaagcaatcgttttaaaatgaatacgtaatagaagtggtggttacacaaatgatggttatgtaacccgcagattaacttcaccatccagccttcacctcctacgacgggttttcttctcaacttaaaaggacaaccacactttctagtgctagtggtcgttcgtattaaatctttgttgaatgttttataccttccactcctttcataactaatcaaaataaatgaggttcttcccctcttaccagttgttgtgcagacctcatcatcacagctacaaaactaatctcatatgcaacactataagcccattgcaatacctcctcacgagaattaaatgttgattcaaaaggagtcacttgaagatgaacaaagaatcaagcttagatgttttgtgctttcaacatgccttgaagccttggaaatctatttgtgattgttgtaaagggaagaagctatctctgatgattcagtgtgcatatcattcacttaggattgttagattgtgtgttaatacaaaagcaattgataattaaggcaagtttaaaaccaagtttttggaaaaataaggttatgttgttttaatcgattacaaatagataggaatcgattattttgttctttgtgccttctggaaaactttctaagaacaatgtagtcgattacatatcgaattaatcgattacctaggctaaaattaaaatattaaactctctgtcttaatcgattacagaagcttgtaatcgattatattctatgcctgtgccaaacatgctttgttgatttaatcgattaccagaaatagtaatcaattacatagtgcatttgaaaatgaagagcttcctgttttaatcgattatgtgacgagataatcgattattatgttcatagctcaaacccagaacaaatcttaaacattttaatagattacattcttgaattaatcgattacatatgctaaataattgattacaggagcatatataatcgattattttcagttagaagtctgttataaatagaaccctttgctctgctgagtgacagacttgagaaattcaaattctgagcattcataagcattcttaacattctattagtgatttttctgggttcacaaatttcttgccttcaccaaaattcatatgggttattgattgattgagtgaagcaaaatttgttttcaaagcttgaggaaagggatgttctaagtctgtaaatctttcatcaacctggtgaatcattcatatgcatattgttcattggatcatcaggtgacttctttccttaatctttgaagttgtaaatctgtttttaatttctgtagtgatttgtctattgtaaatgggtttcttgcttgttaactagagatagagtttctcttggggtttgctgagtagtgttctcagtgggttgtctctaagaatctaatagtgttttagatttctgaactttatctagggttgataaagataggctttgtaataacttgtaagaacagatatttgcaatagtggaactccattctagagttgagtggaagaaactagatgtagcttcatagtttttgaagtgaaccagtataaattgtggctgatccttattctcctctcatcatctcaatattgttttgatttgtgaatcatattctttgcacagtaagctttccatttgtctattgattttcttgatagaggaatttgatggaatataaagattcttgatttcaaaagtttttttttaagtgataaagatcctgtggaaactctgatagcaaaatttttaaataccaaggttcaaccaattgaccccccctcttggttgtattgaagtattcctatcattttcaattggcatcaagagctggttcttgaaagttattcaagatcgtcttttcttttcaaaagaaaaatgaatactttacaaataacctttaaggaaggtgcttctttaaacagacctcctatgtttgaaggggaacacttcagtttttggaaaaatagaatgaaaatctttattcaatcaaatgacccaggagcatggaatgcaatagtgaagggtccttttattccaaagaaaactgttgcaaatgaattgattcccaaatagtgggatgagatgactgaagctgaacaaagggctgcacagtatgattttaaagccaaaaatatgatcacctctgcattttcctctgatgaatttttcaggactatgagatgtaacagtgctaaagaaatgtgggagatgctggaaataaatcatgaaggaactgaggaagttagaagatcaaggaagcatgctttgatccatgagtacgaaatgttcaagatgaacaccaatgaaagcatttctcagttgcagaccagatttactcatattgtaaatcatcttttgggtcttggaaaggtctttgacacagaagaattgaacattaagatattgaagtgtttgacaagaccttggcaaccaaaggtgacaacaatcaaggagtctaaggatctatcaaagatctttatggctgcattgtttggtaagcttcttgaatatgaacttgaaatgtctcaactaacatgtagtgaagatgcagaaaagaaaaacagaagcattgcattgaaagctgcaaccttgaaagctgaaaaagaagaggaaactagtgatgaggatgatgaagacaatgtgaacttagttgtcagaaagttcagcaagtttctaaaaaagaacaagaacaaaaagttcaataaagccagcaagaacagcaacaggaacaacaacatcaacaagaagattgacaacaattttacatgctttgaatgtggcaagtcaggccatatcaaatctgagtgttcaatctacttgaggaaacaacaaggagagagcaagatgaaaaaggaggggaaagccaaaagagcttacatagcatgggaagataatgaatcaaccacttcagaatctcctactgagcatgaagaagctaatatgtgtctcacctccaccatcaatgaagatgatgatgatttgctaagtgatggagataaggtaaattatgaacttgatcaagctattcatgcttttcaagaaatgcatgaggaagccaaaaagcttgcaaaatccaataacaagctcagaggaaagcttagatggcatattgctaaaataactgaattgcaaaatgagatttgcaacttgaaagaagaaaatgaaaaacttgtttcaagttacaaattgaatggatgtgtgtgtgcttcttcctctagcaatgttgataagtataacatacttcaaaaggattttgatgattacaaacaaagtcaaggagaaaagtacatgttgcttttagccaaaaacagtgacttaattgatctcttgagaaagttttacaacagaaaatgcaacttggctgaaatgttaagtgtgtaaaagtatgctagagatacttctggtttggggtataaacatgactcaaaatcatttggaaaaacagtttttgtacctccaaaatagaagaatcaaaagtggcataaaaactcaaggatcaatcaaagttctggatttggaaaacctttaaaatctgtcacttgcaactattgtatggaaaaggggcacacatcatttaaatgctatgctaggagattctatgtgcctaatggtgattgtatttggattcctaaaagaaagaaaaatgcaaacccctatggacccaacttcaattgggtaccttcccttgaattctgatttgatttttgcaggtgtgtctaacagctagatcctcaacttggtatcttgacaatggatgctctagacacatgacaggagacatgtccctacttacaaatctaacacttaaggaaggaggatatgtcacctatggagataacaataaagggaaaattattggagaaggaaatattggagacaactttaaaacaaagataaaaaatgttctgtatgtagatggtttaaaggtttcaaagttaatttcaacaaagaatgctgcataatttctgatgggaaaaagtgatgaagttctgcatataggtaaaaggaaaggtaacatatatgtactttcaattgatcatgcactctttcataaaacttcttgtctcataagcaaggttgatgaatcttggctatggcatagaagagcaagtcacataaacatgcatcatatgaacaagctcataagaaaagatttagtaattgattgggttacccaaacttaagtttgagaaggacaaactttgtgatgcttgtcaaaaggggaaacaaataaagaactcttttcaaagtaaaaacattgtttccacctctagaccacttgaacttcttcacattgatttgtttggtccttctagaacaatgagtttaggtggcaattattatggacttgtaattgtggatgattactctatatacacttggactatgtttttgaaatccaagagtgatgctttccttgcatttagaaaaatggctaagcttactcaaaatgagaaaggttgtaagattgcctctataagaagtgatcatggtggtgaattccaaaatgaacattttgaaaaattctgtgaagagaatacgattaatcacaatttttcaactccaagaacaccccaacaaaatggtgttgtggagaggaaaaatagatctcttgaggaaggagctagaacacttcttaatgagtcaaatttgcctaagtatttttgggctgatgttgtaagcattatatgctacactatgaatagattacttataaggcctattttaaagaaaactccttatgagctatacaaaggtagaaagcccaacatttctcatttaggagtatttggtagcaagtgtttgtattgaataatgggaaagaatcacttggaaaatttgatgctaaggcagatgaagcagttttccttggatattcattacatagcaaggcttatagagtattcaataaaagaactatgtgcatggaagaatctgtacctgtgatttgtgatgaaactaatccctctaaggaggaaaaagagaatgatgtagatgcaggtcagatggaagaattcattcaactggacaaatccttaactgaagaagaagaatcaagtgctgaagcaaaaactacaacccctgttcaagtgcctaaaaattggagaacaacaagagacttatcacttgataacatcataggtgaagtttcaaagggagtatctactagatctttattaaagaacctatgttgtgatatggcttttgtttcataaattaaacctaagaacattgatcaagccttaaatgatgaacattggatgcatgcaatgcatgatgagcttaatcagtttaagaggaatgaagtttgggaacttgttcctagaccatcttctcttaaacccattggcacaaaatgggttttcataaataaacttgatgaaagtggaatcatagttagaaataaagcaaatgaatcattcatatgcatgttgttcattggatcatcggtgacttctttccttaatctttgaagttgtaaatctgtttttaatttctgtagtgatttgtctattgtaaatgagtttcttgcttgttaacttgagatagagtttctctgggggtttgctgagtagtgttctcagtgggttgtctctacgaatctaatagtgttttaagtttctgaactttatctagggttgataaagagaggctttgtaataacttgtaagaacagatatttgcaatagtggaactccattctagagttgagtggaagaaactggatgtagcttcatagtttttgaagtgaatcaatataaattgtggctgatctttattctcctctcatcatctcaatattgctttgatttgtgaatcatattctttgcacagtaagctttccatttgtctattgattttcttgacagaggaatttgatggaatataaagattcttgatttcaaaagttttttttaaatgataaagatcctgtggaaactctgatagtaaaatttttaaattccaaggttcaaccatttcaccccccgtcttggttgtattgaagtattcctatcattttcattaaacacctacaaaagttcaaaatacatctttaatcttatgaaagaattcatttattggctttcaggaaatactatatcatataaatacctttgaagtattgaacgcatccaaacaatcaattaaagacttgttattttcaaagtcaaatgaatgcctgatagagtgcttttagttgagtatttttctatcctgcttagtttatttgacctctcttggacctttattttcctattctaattcagtttttggcctaggcaagtaagtgggcttaattgcaaattgttacgtattttcagattttttgctcacttgatgtatctgacttgtgtaggacctatagggtgctaccgatccgcgaatagagcgttctaggagtccctggaaagataattaaaagatctacaagtttgctagaaatagcccgaggccaattctgtcatttagagggtcattttaagcttggaagttagcacctctgcacttgtaattttgggctgcgaatttgactttcatggttgtaaatagcaaataattagattgttgggtttgtttgtggcccattttattttcagaactctgtcactacatatattagtgactttagtgaaacaaaaaacacacttttcattttaataaaacagttttacatttctctattttaggtttttaggatcaaaacccttgctctcattttctctctactgttcttccttgttcttgattgttcttcatttttcatttttctgttcttctattttcgtgcactcaatccatggggctttcattgatgatgatcatcgaaggctaaatcaccaatcaatccaaggaaccaacctaagcacaaggagaattggagttctggtttagtatttcgaattctacttgaatgttcatcttcttcttcaattgctattctgtttttcatgattatgaatgcgtttaggattgaaagtggattaggttatggattcatgcctaatttcgaatattaatcacaaaataattggatgatatttcaattagggttgtggttttaattaaattaagggttaatttgattgaacaacttctaatgagattgaatgaatgttcatgataggataaatttctaagaatgatgatgattcgaattgcttggtttggtgaattggattgatgcttctctaatttgttttactcacttgttgataatcttgttaatttctgcactgttctttaattttagtttacgtttttgcaagttttacttacgcgcacaaactgtttgataaaattccccccttattgttattcgtaaattgaaactagaaccatattgattgtgtctctgagtcgacctaggttagctctgtgctacagaattagcttaataaaattttttggtgcgtgtcgacaacgtgaaatcaaaactggcgtcgttgtcggggacacggttcattgtgtgctagctttaatttgctgtaaatagttcatagtagtagttatatatatatatatatatatataatcatttgcatacattcactgcatattgacattctgttgcataattgcactttgtcacatatttgcgttattgctgctgtgcattatgaagtatgaatgatgtagtttatgtgtgctgtcaaaaaacagagaaaacagtgaaaaaacagagcaaaaaacagagtagtagtagggagaaagtagtgtagtgtagttgtttttgtagtgtcattttgctgtcccaaaatttttccagcttgtgcagtttgagttgcgatttgtttcccaaggtttattccccattttaaaaaaaagcaacccctttaggggttgggtgtgggttcaaatcggcaaattcgaactctaagtaggagttttggaccagtttttacaattgacgtaggggcattctggtaatttcacagcaaactatctcggaatgggctgaaattttaccagaaggtgtagaaaattcatacatcaagttgaacctgttatggagtaacatgttcaccaggggtccaaatcgccaaattccatcgtttagaccattttttaggtaattttctaatttcatgatttttaaaaatcaccaaaaaaatcacaaaaatcaatcatgatttttagacatacactgttatttgtttagattttttcaaaaatttttagggcaattttctaatttctatttcatttcagcatatatagttgatagtgtcctggtagcatagttgtttgatatttctatgctgtctgtgtttattgttccttataagctgaactgtgtatgactaggtctacatcaagtgaattacattcatttgatcctgagatagatatgacatttcacagattaaatagacataaccctaggttagatgacttagatgactttgatagtatagttttagacagtagtgtagtatcttctaactttgattctgaatctgtttctactccttctacttctacacatcttgatatcatggctgataacaacctaactcttaaggagttagctacacctgatgttgtttaccaaccctggtgtattcaatatcctgagactgaggtcagttatgaattgaaatctggactaatccatttgcttcctaagtttcatggacttgctggtgaggatccacataaacaccttaaggagtttcatgtggtgtgttccaccatgcgaccacatgatgttcatgaggattattttaagatgaaggcattccctttctctctagatggtgttgctaaggattggttgtaccttcaaccagatcctatcaccacttggactgacatgaagagaagatttttggagaaattcttccctgcctttagaacagcatccatccaaaaggaaatttgtggcataaggcagttccctggagagtctttgtatgagtattgggaaagattccacaagttgtatgctacctgtcctcaccatcaaatcagtgagcaattactaattcagtacttttatgaaggattgatgttgatggataggagtatgatagatgcagctgacaagacccctcttgctgcaaggcagttgatttctaacatggcagccaactatcaacaatttggtgctagagttacaacaactaaggtgatggctgcaaatgaagcttttgtctctatggttgctgataaccagagattggagaacaagatgatagagttaacatcccttgtgaggcagcttgctattgggcaacaacagaatgtgacgacagccaatcaaccacgactctgtggtatttgttgtgcccctgatcatcccaccgatgcatgccccactctccaagagacagaacagcttgctgaagtttttgccatgcaacctggccagtcatttagacctcaacagtagtataatccttactccaacacttataatcctggttggagagatcatccaaatttgaggtatgatcctggtccacaacaacagcagccctttagacctccacaacagcccttccagcctgccactactaaataccaacctcctccttttagacaacaaccacaattccaacaaccggcacctgcacctagacctccacaactggtgcaggctagttctggacctttcttggaggatttaatgaagcaaatggcaaccagcaatctccagtttcaacaaaatgtcagtgccaccatccaggacttgcagactcagattggacagttagctacaactgtcaatcagatgcaacaacaaggttctggtaatcttcaagcacaaccagttgttaatccaaagaatgtgagtgctattaccttgaggagtggcacagaacttccagatgctggtgctaaaattgatgcaggtgctagtaaaaagttgataatggtgccaaaacagattcctttaccttttccttctagagccattcctgcaaagaaagtggtggaccttgattctgatctgcttgagactttcaggagggtggaagtcaacattcccctcttggatgccatcaaacagattccaaaatatgcaaagttcttgaaggacttgtgcacccacaagaggaagcttaagggaaatgaacaagtgaagatcggaagaaatgtttctgcattgatacagggtaaagctgttgatgccatcccactctccaccttgccacagaaatgcaaggatcctggcactttctctgtcccatgcaccattggagatgttacttttgcagatgccttgtgtgatcttggagcctccattaatgtcatgcccacatctgtttacagagcactacaccttggtgagatgaaacccactggtgttgtcatccacttagccaacaggagtgctgcacttccacttggacttattgaagatgtactggtgcgggtcaatgattctgatcttcccagcagatttttacattttggatatggagaatgagtcttccagccatggtcccacattgatcctagggagaccattcctgatgacaacaaggaccaaaattgatgtgcatgtgggaactgtttctatggagtttggggatgacattgttcagttcaacatcttcgaggctatgagacatcctgcagaggagcattctgtttttctccttgatatcattgatgttgtagtagatagtgtagatatttctgatttttctgatctttcttccgacttttctgattttgatcttggttcttgtaactgtacctatgatgattatgctgctgtgtgtagcatttgtgtggaaatttcctccgcacttcactctgattgtgttccaggtgcagatacaagttctaagcctactatcccactttcctcagcttctagtcttcccttaccttccactattcaacccccttccttggagttgaagtcactacctgagcacctcaagtatgcatatttaaatgatgctcagaagctcccagtcatcatatctagtagtctaccactggagcatgaagaaaagttgatgcatgtcttgaggggccacaagaaggctattggatggacacttgctgatctttctggaattaatccctccatctgcatgcatcagatacttttggaggatgattctagaccagtgaggcaaccccagaggaggctgaatcccactattcttgatgtggtgaaaaaggaagtgacgaagctactagctgcagggattatctatcccatctctgatagcacttaggtttcacctgtccaagtgcttcctaagaagtcgggtctcacagttgtaaagaatcaagataatgagttgattttgactagagtggccaacagttggcgagtttgcatagattacaggagactcaaccaggccactagcaaggaccatttccctctctttttcattgatcaagttttagagaggttggcaggtaaatcacattactgctttcttgatggtttttctggttatatgcaaatccatattgcaccagaggatcaacataaaaccacattcacctatccatttggcacatttgcttacacccggatgccttttggcctatgcaacacacctggtaccttccaaagtgcatggtaagcatcttttctgatttattagagagttgcatggaggtgtttatggatgatttcactgtttatggttcctcttttcatgcatgtttggatagtctctctagagtccttgaccgatgtattagtactaaccttgttcttaactttgagaaatgtcattttatggtgcatgagggtataatcctaggacatttggtctctagtagaggtattgaggttgataaggcaaaaattgatgtgattacctctttgccttaccccgcttttgtgcgggtagtacgttcttttcttggacatgccggtttttataggagattcattcaggattttagtaaaattgcattgcaattgtccaagcttcttcaaaatgatgtagactttacatttgaccagccctgcaaataggcatttgagggattgaggagtaagctgactccctctcccatcatgcagtcgccaaattgggagcttccctttgagctaatgtgtgatgcctctaattatgcacttggggctgtgttgtcccaaagagttggtaaactatcccatgtcattgcttatgcttcacgcactttggatccagcccaagttaactacaccaccactgagaaggagcttttggctattgtttttgctttagataaatttagatcttacttgctttgctctcatatcactgtctttactaaccatgcagctttgaaatacctgttgaagaagcctgatgctaaacctagattgatcaggtggatgcttcttcttcaggaatttgacattgagattaaggacagaagtggtatagaaaacttggttgctgatcacttgagcaggattgaggaacctctcgagtcctttcccatttgtgataattttcctgatttgatgcatttgcattcatcgcatgtcacaccttggtttgctgacattgttaatttccttgttgcatctgttgttccacctcatgcatctaggtcccaaatagctaaacgtaagagtgatgctaaatattatgtttgggatgatccttatctgtggaggtttggtagtgaccaagtgatccgaaggtgtgtgcctgattatgaaatttagtctattcttcagttttgtcatggcacacctaccggaggtcattttggtcctcagaggaccgctacgaaggtattagactgtggattcttttggcctaccttgtttagagatgctcatcactttaccaccacttgtgagcagtgtcagagagcaggaggcacaattacacatagacatgagatgcctcagcaacccattattttttatgagattttttatgtctggggtattgattttatgggtccatttcctgtttctcatggcttttcatatattttgcttgctgttgattatgtttctagatgggttgaggctaaggccaccagaactaatgattctaaagttgttgtggattttgtgagatccaacattttttgcaggtttggtgtgcctaaagccattatcagtgaccaggggagcgatttctgtaacaccccgaaaatttaagaattatagacaattactacgagtaaaatgttaataagaagcagtagaaatctagggcaaaataccaaaaacgcccctgaacaatttcaaaaatgacgattatgtcctaggattaaaaatgaccattatacccctagacattttgaaaaatgaccaaagtatccctagatattttagtaagatatttattaggagaaattaccaaaatatccttggacaattcctcaaatgacaaataggtccctagggtaaatgactaaaacgtccctgaacatttactcaaatgaccaaaatatccttttagctctggtaaggtcaaatagcctcagaaagattatggaaacttgacaaaagagtattatgcttctagataaggaattagtgatattattagctaaatgaaactatgaaatagaaattttagaaattttgaaagaagtattaaaaataagttaatcaatagttccttcagaacactgaaaaaggaaagacacaatctcgagatttttctcttaattatggaaggaatgaattcttaaataagttgttgagtcattttactaaattaaaaacaaaatgaaccaatagaaatttagaaaagttattagaaggaaattaggaaacaataatggtttaaggaaaaatttattgaagaaatttcctcttgattgctttggacacgaatgaagttatagttattatttcaaaaatcccaacggtcaacaattagatatatgagttaggattacaccattaaaattttaataagatccaacggttaatgagttcagaataaaaatttttgtaatacgggtttgacagaatttttaggaataagactattccacggttttaagcaaaaaatttcatacgatttgcttctaaaatccatgtgaccgtgcacttcaatcaaagatgaagaaagcttgagaagagtcaagattagggacacttgtatggacaataagctaggaaccataagataaggaccacttggaaagtgaattaatcatggctttgatttttaaaatccataacacctagcctaagcaaaaactacacggctttgaatgtccaccaagtgaaatgcacgaagaagtaaggaggtggtagatcattcaagaaacaaaacacttggacagccaagattcattatccaatagaaattaagcaaatcaaaagcaagctataattacctaaggaagattttttaaggcaaaaggctaacactttgctataagaagcaaaagggaccgtgcacacaagggggagaacgtgaaaaccctctcttgaagccttgaccttttcaaaaccaatttaaaatactttcaaaccaaaaacaagacttaaccgtgccctactccactagtacccctttttactttggttttgttatcatttccaaatcattctctacctaaaggaaaccaaggaccattattagagcaatttcacaagggattctaaggaaaagaagtccagctattcaattttaagaagaacaagtcaaagccttggaagaacaagtgtaggaagctaggagccttgaaggaaaattattagatttcaaacaaagaaaagctaaggtatggggagtattttgataaacatgggttagataattgatgaggctaatttaacattcctttctttagaattaaggctatgttactccttgtcttgtaagctttaaaatttggtacaccatgtgtttgtaaaaatgtcacaatgaagcaatatagtgcataggccataattgacaccagtaacttcaactaacttaagaactaattaatttagatcaacaaggaagtaacaaattagattttaggctatagactattctgctgtatgttattttatgatgctgtaagttattttaggttgctgtattttgatggctgtatgttgctacttaatttattacgttgctgtgaataaggttgctggatgttgtatgctgttgatgtattaaattaagttgtggttgatgtatctgtatgttattatgaagctgtagttaattgggttgctgtgaattatttatgtggctgtctaatattttattgtggtgctgtatattattgtatttgtaattaatgttgctgtgtgatatctggttatgttgctgtaaattattgtatctataacattatgttgttgtaagttattttattatatggctgtttgtcgttgtttaattcatttatgttactgtatatttcatttgggtgatgtatattttatttgatagcagtattgctgttattgtaagtactgtttctgttgctggatttaatgtttataatattatgttgatgattgctgtatgataattaatatgttgttgtatggagttgaatctgtaaccaaataatgttgtacaagttgctggttattttggtgttccactggagtgggtgggactgtctgatatgtattccactggagtgggtggaattagctgatatgaaaatggaaataaataaataaagagataaatgaaaaataaaccagccatgacattcatcatttgcatttatcccctcagagcggagggaggtctcactggagtgggtgggactgttccactggagtgggtggaactgttttatggtaccttttcttttatcccctcagagtggagggaggtctcactggagtgggtgggactggtttcactggagtgggtgaaactatattgattttggtaccttttattaggcctctgagatctcagacatgcatcatttaataaagaaagcatgcatcattcatcaagaatctgtcttataattaatatttagttttgatgaatgatttgtttttacttggtcttatttatctgtttctgtcaattatctaattctgtttattaaaatacttacccgagttgtgtctgtggtttgacacctgtgatgaccccaattaatttgggcgagcagaggaacagtaagccaagaaaagccctgaggaagaagctggatattctatgtgctgttggatgttctgtaaactgtgtttgtggttttctgtttgtctgtatttgatgctaagctgagctgtataccttacgttgtaacagactatttgggactgtgttgtacttggactgttaacattctaatatgtgttaaggaattttatttacatgatccgtagtgaggaaaaatcgttcatattacagacaattcataaatctagcaagcaaagcgaaatgaaatttaagtactgaactcaagtagaaatagaaacaaaacataatttttgtttattacaaatagaaagcagatattaaatctaaattttcctagatttctgcagatgctggatcatccatatgagcctcaatagcatctagcctttccctaatttcttcaaaggctccatgagtttcagccttgaagtcctcttgaagcttcagcaatgtgtccatcttttgaatcgtttgattcaaaatcagaaaaggcttgaggtgcaggctgtggtgttgttgttgttcctcatcctcagaatcagcagctatctccccttgcaatgcagcaccaatatgggcagccattacccagccttggggtgtcttcttcatgcccatcttggtaagatgtgattccttaatttggctattgtaggcaagagtattatctatgacttcattttcaacatctatgttgaaatgatcaatgagcctagagacgaaaacaggatagggaaatgggtaattaaccagcctttttgacttcatcatgatctcttcaaagatcaaagcccaattcatgggaatgtgacttttcagcccataaaccaactgcagatcttcatcagttgcctgggcatggttggttgctctaggagttatgatgtatataatcaagtaatgcagcattctatcttcagcagtcataggacctgtgccaagtcgggtcctaagcctcatgtttggatcatgaagcatacccctataggtgtccattttgctgtagccctcaggatcttcatcaaatctacgggctccctcacaagtaatcccaccaacagtttcccaaataccaggggtgatgtgcatggctaccccttttactttggacctcatatcaccctgcattgagcccttcaagcaggtgtaaaacactctaactagatcagggtagaaggtacccttcatctccagaaacctcctaaggttttgagactctagataggcagggaattggaatccttgccttatgaaccagtctaactctatgtatttgggagttgccacaggcttagtggcattaaattgaagatagttcatcttatctgtctcagatgagaaccagatatcaagcctatttgctggttgaggttagggttgaggttgagggggattagatgaggattcaccatgtctcctctttggtttcctaactctcttggaagtaggctcagacattatgtatttagaagttgtgagttactgactagacacaagaaaaatgcagaagagagaatgagaatttgtgcagtgattcaaggtacacaatacactatttatagaaaagaatcaaggcataaatgtccatattttcaaaaaaaaatatagctgttgggacggtttaataacattggaaattgttttgcattgatttagcagttaagagaatccattaaatcagtcaaagaacaggcaacagcacgaataatcgattatttcgaaaaggtaatcgattattccagttcaaagagttttctgatgacagacatgataatcgattaaatttcttttgaaatcaattataattcaagtgatcagaggttagagaagactcgtaatcgattctttccataagtaatcgattatttcagagcattgatctaatgaacatgtaatagagcaataggtaatcgattatcccgagtggtaatcgattatcacagagtgagcattctttcaatataagaggtagtcgattacgacttctaagtaatcgattattccagagagatgtattttgaagttttgaacttttggataatgtaatcgattatcccgatgtgtaatcgattattccagagaaagatgttttcttagaatgtgacgaataatcgattaccattggtgtataatcgattacactattacaattcttgttccagacttaagttttaatgattttaattgattaacccgtggtgtaatcgattactactgagcatttatcatatacagagcattttagcagctttttgataattattcaaacacattagcatttaaggacattcaggctttcacttatcatataaaccacaaacagaacaagctagataatgttactctcatcaaggatccctagcatgtttctaagtgtataaaatctatcccttgaaagtggttttgtgaaaatatcagctagttgatgattggtgtcaatgaagtctacctttacgttacctttttgaacttgacccctgagaaaatgatgccttatctcaatatgctttgttcttgagtgcattattgggttctttgatatgttgatggcattagtgttgtcacatagcagaggaatagcattcagttctactccatagtcaagcatttgctgtttgagccataagctttgagcacaacagcttccaactaagatgtattcagcttcagcagtggaaagtgctacacatgattgcttcttgcaatgccatgagaccaatgagcttcctagcaatgacaagtgtcacttgtgcttttcctatctaatttgcaacctgcaaaatcagaatcagaataaccaataatatttaaagaagcaccttttggataccaaagaccaactcttggtgtagctttgagatatttcaggattctcttgatagcagtaaggtgtgattctttagggtttgcttgatatctagcacacaaacaaacacttagcattatatcaggtcttcttgctgtcaaatatagcaatgatccaattattcctctgtacattgactcatcaactttcttccctctttcatctgtatcaagatatgttgatgtagccataggagttgtagcattcttgctcttctccatttcaaatttcttgataatttccaagcagtatttggattggttaagaaaggttccattcttcatttgctttacttgaagtccaaggaagaatgtgagttcacccatcattgacatttcaaattctttctgcatagctgatgaaaaatctttgcataacatgtggttagtagaaccaaatataatatcatccacataaatctgaaccagtaagaaatcattgccaagctttttgataaacaaggttttatcaacactccccctaataaatgattgttcaagcaaaaacttgcttaacctttcataccattgcctaggggcttgcttcaaaccataacgtgcctttttcagtttgtaaacataatttggatgtttaaaatctttaaaaccgggaggttgttcaacatatatgtcctcttcaatgtatccatttaaaaatgcacttttaacatccatttgaaaaagtttgaaatccatgagacatgcatatgcaagtaataacctgattgcttccaatctagcaactggagcaaaagtttcctcatagtcaatgccttcctcttggttatagcctttagcaaccaatctagctttgttccttactatgattccactttcatcaagcttatttctaaaaacccattttgtgccaataggtttaagagatgaaggtctaggaacaagctcccaaacttcattcctcttaaactgattgagctcatcatgcattgcatgcatccaatgttcatcactcaaggcttgatcaatgttcttaggctcaatttgtgaaacaaatgccatatcacaacataggttttttaatgaagatctagttgatacttcctttgaaacttcacctattatgttgtcaagtgataagtctcttgttgttctccaatctttaggcattcgtagaggagttatgggtctttcgtctgtttcagcacttggttcttcaattttggttgaggtattgcttgtatcaattaattcttctagctgacctgcatcaccatctaattctttttcctccttagagggattagtttcatgacaaatcacatgtacagattcttcaatgcacattgtttttttattgaatactctatatgccttgctatgcaatgaatatccaaggaaaattgcttcatctgccttagcatcaaattttcctagtgattctttcccattgttcaatacaaaacactgttgattctagtgaagccaagtatcaatgaatgaagatcaagcttcaaggtttttgactttcaaacatgcacaaaaggataagcccaaaggaaaacttgaagaatcaatttgatcatttgtaaaaggaagtatatgatctgataatccaagtatatgcatcatgcatcattcattcatttaaaggtcattgaattaattgattaagtaaaagaaattgttcagaaaggcacttagaatgaaaagtttttggaaaaataaagttgctattaaataatcgattacataaataagagcatcgattattttgttcttcgtgttctttaaaaacaaaacatgatcactgtaaccgattacatctcggtttaatcgattactcaggcttttatgaaaaagttggaactctctgtcttaatcgattacaatagatgtttaatcgattacttgtgagggtgttttataagacaaggattccaatttcctgcctatctagagtctcaaaatcttaggcggtttttggaaatgaagggtaccttctaccctgatcttgtgagggtgttttatacctgcttgaagggctctatgcagggtgatatgaggtccaaagtaaaaggtgtaaccatgcacatcacccctgatatttgggaaactgttggtggaattgcttgtgaaggagctcgtagatttgatgaagaacctgagggctacaacaaaatggatagctataggagtatgcttcatgactcaaacatgaggcttaggaccagacttggcacaggtcctatgactgctgaagataggatgctacactacttgattacatacatcataactccaagagcaaccaatcatgcccaggcaactgatgaagatcttcagttggtgtatgggctgaaaaatcacattcccatgaattgggccttgatctttgcagagatcatgatgaagtcaaaaaggctggtgaattacccatttccatatcctgtttttgtttccaggctcattgatcatttcaacatagatgttgaaaatgaagtaatagataatactcttgcctacaatagccaaatcaaggaatcacatcttaccaagatgggcatgaggaaaacaccccagggttgggtaatggctgcccaaattggtgctgcagaacacggggaaatagctgctgattctgaggatgaaggacaacaatagcaatctaggcaagcacctcaagccttctctaattttgaatcccaaatgattcaaaaaatggatactatgctgaagcttcaagaggacttcaaagctgaaactcatgtagccttagaagaaattagggaaaggttggatgctattgaagttaatatgaatgatcaagcatctgctgaaatttaggataatttagatttagtatgatctgattcttattttgtactggaaaatatcatgttctgtttttacttctatttgtgttctgttttttaatttcattataaacttgccccatatgttagtctattaatgactctatgcaatttcagtattaaatccgttgtgctcacatcatttttgacttttaacaagccaaatagggggagaattgattaagggggagtagtttgatatatactctgtttatcccttttttttattcaaatttttgcctagaaattaatttgaagggatgctgaaatttagggggagttttaggtgtaaaaccgaacctatactaatagaaacatgattgattgaatgcttcatgaacaacatgtgctttaacacttgtttttggccagattgtttgaaagttttcaagtttatagtgcttgtcaaacaatagcttatgcaaattgatctccaagaatctttgcttaatcaaatggaagatttggcatggttaaagtcaaaaagggggagattgttgattctagtgaagccaagtatcaatgaatgaagatcaagcttcaaggtttttgactttcaaacatgcacaaaaggataagctcaaaggagaacttgaagaatcaatttgatcatttgtaaaaggaagtatatgatctgataatccaagtatatgcatcatgcatcattcattcatttaaaggtcattgaattaattgattaagtaaaagaaattgttcagaaaggcacttagaatgaaaagtttttggaaaaataaagttgttattaaataatcgattacataaataagagcatcgattattttgttcttcgtgttctttaaaaacaaaacatgatcattgtaatcgattacatctcggtttaatcgattactcaggcttttatgaaaaagttggaactctctgtcttaatcgattacaatagttgtttaatcgattacttgcctgaacatgcatcttaggaaaatataagttgactgtcttaatcgattacttcacggaataatcgattatattgttctttgcctaaacccagaaaagctcaggataattttaatcgattacattatttccttaatcgattatgaggtttattttggaaaaacatgtgcctctggcttaatcgattacgtatcggaataatcgattaaatggttcattcttgaaactcagaacgttttataaagagattaatcgattactatcttgatttaatcgattactatcttgatttaatcgattacatatgctaaataatcgattactggagcgggtttaatcgattattttcagttaaaaagatgttataaatagagcctcttcgactgaggtttgtaacttttgatcatttgcgaaatttcgaagtctaaagcattcacaaaaactttgagctttcattagtgagattctctgtgttctaaacatacctagcttcacaaaaatcatatgggttgttgaattaataaaatgaagcatttgttcattcaaagattaaggaaagggaatgcattaagttgattgtctgtcattcaattcgtgaattcatacatctacatgcattcttggattattaggtgatgtctttccttgttctttgatggtgtaatttgctatttgaattgtttgtaaagattgatctattgtatatgagtttcttgcaagtgtagagatagtgtttctctagttttttgctgagtagtgttcttggcaaaagggatttggtctctaagagtctaatagggttttagacttctgaactttatctagggttgataaagagagacttgtataattgcttgtaaggataattgttttgcaatagtggaactctactctagtgttgagtagaagaactggatgtagcctcatagtgtttgaggtgaaccagtataaaatctgtggctaatctttttgttaatctcttcatctattaattactttgtttgtaaatcaatatcatttctcagaattctgtactctgtcttctattctttgtgaaaagggaatttgattgaatattgattgttggtattgaaacaatttctaaatgtgataaagatcctgtggtaactctgattttaaaattttaattggacaaggttcaaccaattcaccccccctcttggttgttttgaagtgttcctttgtttttcaattggcatcaagagcaggttcttgtaaattactcaagatcactttttctttctaaaagaaatgatgaatacttcacaaataacctttaaggagggtgcctctttaaacagacctctaatgtttgaaggggaacatttcagtttttggaaaaatagaatgaaaatctttattcaatcaaatgacccaggagcatggaatgctattgtgaaaggtccctttattccaaagaaaactgtggcaaatgagttgattcccaaagaatgggatgagatgactgaggctgaacaaagaagtacccagtatgattttaaagccaaaaatatgatcacctctgcactttcctctgatgaatttttcaggactgtgagatgcaatagtgcaaaagagatgtgggagatgcttgaaattactcatgaaggaacagaggaagttcaaaggtcaaggaagcatgctttgatccatgagtacgaaatgttcaagatgaactccaatgagagcatttcacagctgcagaccagatttactcatattgtaaatcatcttttgggtcttggaaaagtgttcgatattgaggagctgaatatcaaaatactaaaatgcttgaccagatcttggcaaccaaaagttacagcaatcaaggagtccaaagacttgtcaaaaatgtcaatggttgcattatttggtaagcttcttgaatatgaattagaaatgtctcaattaacatcttgtgaggatgcagagaagaaaacgagaagcatagccttgaaagctgcaactgctaaagctgaaaaggaagaggaaactagtgaagaggatgatgaagacaatgtgaacttagtggtgaagaagttcagcaaatttctaaagaaaaacaacaaaggaagcaaaaacagcagcaataacaacaacttcaacaagaagattgaaaacaacttcacatgctttgagtgtggcaaaccgggtcacatcaaatctgaatgtgcaatctacttgaggaagtgatggtcgataaatacggcaagtgcaccgatcattttcaagtaataaagttaggtaagtgagtatcgttctccacagggattggggtaattccacagtaatattaacgaatgtgtttgaacttaaaacagaaaattacgcaagaaatgtttgattgattggttgtttgagtgcaaaaacaaagtaaataaatgcagtaaataaatttgagaagttaccaatggaaagataattgtggtcaggcacaatccctttctgagtcctcctctttcacttgactgttttgtcaacttaatgtgcacacataataaatctctcctatattcgtaaatcttagataactagcgattcaaccctttaattcgatcgagaaccctaaacatttagcgattctgtcaaactaagcaattaaagactatatcatgtgggttcctgttatgattgttcagaaaataagcctttcctttattagttaacccctaattccttagtgaattaaccctttaatctgaataaaaaacctaattccttagtgaaatctatcaagttaagcatttaagggtcatattatgaaatctgcactcacgcatccctattcctaggtgatgaacgaatgttattcttaacaagtcagacattagaaccccaacgttcccattgcgaatcctaactctaaatacttaatcgaagcgatcaaattcaattaagaatagaaattaagaacagaaaagaataaaacaatcaaaacatattattcaataccagtcaaattacagaggaattctcagcagttcatggccttcccacaatataaagtttagccagccataggccccaagaatatcaaagcagtagtatgattcattgttgtgcacacactcagcttgattcttgatttctagggtttttggatgatgaagaatggatggacaatgtatactctggctattctggatgcctcaatctgtttcagaggcttaatatttatagaatcaattaattaaggtaacaaagcccaagacctgtgccaaattcgaattatatctttcaaatcaggaaatcagatcaataaggcacgacccgcgcgcgatttcgcgctacctacgcggcttattcgaatgtctggcgctattagcgtgaccttccacgctagccgcatggggtgttcgagtcaattaatttgttctggtcttctgtggcgctgttagcgtggctacagtgctaaaggcgcggttctctcaaatagatggcgctaatcgcgtggatatggcgctactggggcgagttgttcgagttgaatgctctggcttgttgtccttgatgctagtggcgtgggtttggcgctgatggcgcgatgcttacggcctatttacgctattcgcgtggactttcacgttggtcgcgtggatcattcgagactgatgccttcaattctgcacttggcgcgatccacgcggataccggcgcgatccgcgcgggacttaaaactttgttttcttctttctttttttccttgaactcctcttttggcctgaaaatgctcaattggtattaaatttgaattaaaaacaataaagtgataaacttaactaattctaaactattttcctaattatttaactaaaatataacctaaaactaacctaaaactaggatgtgtttgcaacacatcaaacaattcccagatttgaaagttgttgtccccagcaacagagagaattcaagactacgcaagaatcaacaatcaaacacaaaccacattctacaatcctagaataatcatgctatgtatgatcaattcaagtcaaagctatccatggcactttcaatactgtcaaacaatgagacttacttgagtattcctcacaaagttgcgtttattcattcattcactcaagtgtttaaggctatagttaccctcttactcaacaaagtcacagcactaccataagcttgaaaatattctcaacagttgcaaatatgacttgatcaaaaggtatttccggcttgtaatgtggctgggctaagggtaggatacatttgggaatagtagctcaatcaaaaaggctagatccagttccttaagtctaaacgttgcttcttccatgcttgatgtcatttctttttcaaacctggtacttttattcaaatcatttgtaatgtaaaattgaataataaactttttttttaaaaaaaaaaatattaatatgaacaaaattactgcagcttcacaattctcagctaatggacttattgtcatccaacttggaacatgcttgttcattctttttcttcataccaattggattcacttgtgcttcttgatactttgatggatcattccttgttcttccactgttctagacttaattcaaccttttctagcctcaggaattcggtcaattgaatatggcttttgatttgggacattttgaaatgaaaggcttaagctcaaataaggtgcaattggaaaaatacttgaaggttagtcattttggccctagtttcagaagaaaaatgtgccttaatcatatcaagtcatacatgcatccagagaaacagttcaagttctagagtacaatgaaatcggagtctctcggaaagaaaaacattaccgctgtttggctcaattccttacaggtgttccaactcaagttaatctctgttgactgcatttcaagcatcatttcaacttctacattcatgcatcatgcaattcatgctatgtttcatttcatcaagtttcgtccaaaaatttgtccattactgtgttcattcgcttttaattctgaaaatttttgtgtgctacttatgtttagaaaaatttgaaaaggttctgttagacgtcatttgtttcttgattgtgatttgcgaaatatgcataactgatgtgttgcaaacacatcatagttttagcgtagttttaggttattaattaattaaatatgtaggaaaatagaatagaattagttaagtttagtattttaattgtcttaagctaaattcaataccaattgtgcagatgcaggccaaaaagaggaaacttaagcaaagaaaagaagaaaacaaaaattcaaatcccgcgcggatcgcgcggtaacccacgcgagtggcgccaagtgcaggatagaagacttcagactcgaaagatccacgtggttggcgtggataccgagcggtcagcgtgaaaaagccataacaatggcgccattagcgttggagccgcgccattagcgctaggaacacaaagccaagccaatttgactcgactaactcgcgcccttagcgccatgacccacgcgagtagcgccactctgtcgaacaagccacgcgtttagcgctggataccgcgcggatcgcatgaactcgatcttgtttccttatttaaattatattttttcgagatttggcactgtattaggattagttgctgtaattaaacacttctatatatatgaggcctctgaacagaggtagggacagttgatatagattgagaaacatagttttagctattaccaaccctaggaatcaagattcaaagccagagttctacacaatcatgtcttattcatctgctttggtgttcttgaggcctgtggcaggctaattcttgtattgtgggaaggccatgaactgatgagttatcctctgtaatttgactggtattgaatgcacatgttttgattgttttaattcttttctaatttgtatttcatcttgtttagaattgatcactctagataagtattgagggttaggattcgcaatgggaacgttggggttctaatttctgacctgttaagaataacatttattcatcacctaggaatagggatgcgtgagtgcggagtttataatatgttctttaattgcttgaactgatagatttcactaaggaattaggttttcaattcagtttaaagggttgattcactaaggaattagggatcaactaatatagaaaagacttattctccgagcaatcataacacgaacccatatgatttattctcttaatgcttagtttgacagaatcactaagagtttagggttctcgatcgaattaaagggagaaatcgctagttatctaggattaacgactatgggagagatttatcatatgtgaactttaaagtaacagtccagtcaagtgaaagaggtaagactcagaaggaattttgcctgaccacaattgtcactcacttggtaatcttttcaattgcttactattttcttttaattttctgttttaataccaccaatcaaacattttctatcaactttactgtatttgctttcaatcacaattgttagtattactgtggaatcaccccaatccctgtggagaacgatactctacttacctaactttattacttgtaaacgatcggtgcacttgccgttgcatttgtccacaacagtaaccattcccagatttatatgttgctgtccccagcaaccacaaataaggtcacatcgctttggaaaatttttaagcattattcaaaaaatcgcattcaattccacgttgatctaaacagaaatgcagaatcataactaatatatatatatatatatatatatataaatgcaaaactgaaaaagtgtgtaatgtaatgtaatgtaaatgcagaatcataaaactaacataaaaaccagaaatataaacataaaccaaactgaaacagaaaaacaaacatgtcctgatcactcctctctactctctacaatcactgcatcctctgtagtgtgtggggtgagctcctgaatgggtatctctgtgtctgtagcatctgaaatctgatgtgcccaactggaggagtaagagaatctatgactataggtgctggagtctcagctgtagtagtctctgctggtgctgtgggggctgatggtatctgataatctgatggagagatgcccaagtgtctacagatagcgcctagcatgctcgtctgctgtgcaagctgagtcctaacaaactcctggaaagctaaataagtgggggaatctgtaaaaagtggctcatggccaggagtaggggctgaggaagaaggtgctgtatgtactggtggtgaagatggtgcatctgctggctgctggaatagtggtgggatatctctgggggagcggatggcgatctcctcaggtttgagcttagaagctctaagaacctgctcatctgcgatagaggccatggcgtccgaataagtcttgtagctcatcagtgaagatatcggaacgtccatgggctcgtctatgtgtacgcccgcgtgtcgacacaagtgaagaatcagggaagagtgagctagccaggacttgctgctagcatccctgatcatatgcataatcctatcagacaggatagaagagataagaagattaccctcacaacggagggtatcgagtagaatggctctctctacattcacattcgtcatattagtagaaggtatgacggtgtgattaacaaactggtgccagaataaagcgtcgcccaccaaatcatgctttcgcatcttttctggtatatagtctagtccagatttgggcttccatgctgtgtagaggcctgtgatggccctgcggatggtggtggcgagctggggaacatcgtcccggtacatcttcgtcaatgcatcaggctacatgcgaaggaaaagctggaggaaatcgcattcatcgaaggggtcatagtgggtgtccaagatacgctctatggctcggtcatcaaaagagacccggacacccctcacccaggacatcttagtcctatagacagtatcgtgatcgacgttagccaggaactccttcaggattatgctggagctcggctctggaaaactcactaaacgctgccactgtctccggaggatgactgccctagctgggttatcttctggtagtgtgtcccataaaatcttcttctctaaaattatcttctttggtaaataccatttatcgaacttctcttggcattcagctgtgcggaatcgaagctcatcaaaatctgcaactctagctcgcttcttcccgctttctgcagtagccttctttttgcccttagctatttgctttccctgaaactcagaaaatcccaaacaatgtgtatatattgaaatcagcttaatttctagatttgtttcatgtatttggtcaggtcaacaaatatgaagcacaaattaataaaatatgcataagggaacaggcaatagttcatcatttcaggtgaaaatccaaacacacaagcaatgagtaccatttacaagtaaatcacacttaggattcccagatttatgatcagcatatccatcaagaatcaaaatttaagtagtttatgtaatcatgttcctaagcatttgatcctaatcatcatagatacatattaagcaaaatagattcatcattcaaattagctcaactctggtgttttattcaatttcagtctagtacaattcccagattttgtttctttataagatcaaagcaaggcatgtttagtgaagcagaattcaactctgtatcttatctggaaatttcaatagcaattatcatgtataatcagtcatcacagccattttatcaattataacaaagactcaaccattcgctagtggtttatataatttcaaattaaagattaatccaaatgaattcagcaagagtcatgaactgggattcccagatttaagctttaaccatatccaatttaatcaaggcattccatttcagctcaaaccaattaggtccctgcacttgacatttgcatgaacagctccagatttaaaagaataattgaacatattacaatgaatggttaattttaatctagacatccagctcacaattcccagattttaaaatagtgaagtagtatcaatgtgaacaatgtccatcacatcactaatagtaagtcaagtaggtgacagttcagcatagcaggaacaatcaaggtattacatggtcaaagtttatttcaaattaacttggttcgtaattgactcatttcatgtatcaatagcaatcaattaatcaacaactaattcacacaacaaatcacacattcctaatttaagcttcttgggttgaattccacatgcaatctaagttgcgtccacaatttactcctttaatgccagtgcagacctgctccctttccaggttatcctcaattatgctcaaagcaaagtttgataatcaagcattaaggttgggttttgcgggtatggtaaattcaaatatactcaacaaaccagagttaccacaattatttcaaccaccttttgatgagcataataaaattatacatgcacatttcaaagcaactaatgtgtttgagccttagtcacatgattaatttacttgggtcacaattcagttcaaacatagttctagtcaatatggttcttaacaattcaaagatgcaacatgtatgtgtatatggttgtgtcagaaaatagattggaagcaatttcagtccagatagcaattcccaggtttaagtgtaacccatatatatgattaacaaataatttcacttaggtacaccttgcttcaaatttggtcattgaaaccactgcaccttatgacagataatacacccaattcaactcacaaagcaattatacaagttatatcacaatccacattgtggaagtattcatgcattctcaactatgattatagcttcattatgaaatcaacaaaaataatggcggtaaagtgatagtagaacgctaaagccatgtagccatttccctaccataattcatttccatttctctctcaagcatttttacaaacatgtaatgtgtgtgtaatcaaagcaacacaatatgcctatttggaatacatcaaaaccccaatttaccaaaaccactcaacaatcaaagaaaaacaacagaatttgatcttctaacctatagttctcaagcattttatcagaactgaatgagaagaacttaagcattgcatattgggtttctatggtttctattgagaccattattcatcaccaaacaattacggtccagaaatgtaccttgtctccagccataatcttaattccaaagcttgatgtctacgtgcaaatgcagcaaaaatggaaagtagagagggaatatgatagctatgcaatgtgagaatgagacagagagtggaggagaaaagaaaaatcggaggaggctttttgaagggttgctgatgagatagaggtggttaatggaagtttaaggcagtgctagagtctgggcggaaatggtggagaagattaaggaagtggaagagtgaggcgcgaatgaggaagatttaaataaaaaccgattctgcgatgccgcgcgaatcacgcgaaagcaggcgcaaatcgcgccatgagttctgaatgggatttttggctcgaattggtcgcgcaactagcacggtatgtagcgcgattcgcgtgaataggaactgaaacgtccctttgactcgaataacttgcgcggttggcgcgccatcttcacgcggttagcgtgatttaatgcagaatggttaaattggctcaaatgactcgcgctgccagcgtggtactcacgcgatttacgtgaacaggtcgagaccttggcgctgttggtgccacatctggcgtgggtcgcgccagttcgttcagatgtgagtctctaactcgaacattccacgttgttagcgcggatcgcacgtgattagcgtggataagctgaatgtgtggcgcggttagcgccgcctctggcgcgaatcgcgccaggctttttgcacagctttttctaggctaaaaaatgattatacttctaacctaatactaaggctattacaatttaaaataaaaggaattaaactatctaataatgcatgagatcaacagaatttacctagaatcttaaaacagcaaacatgtacattacatttgtgctcgtttaacgtcttaagctagacgcttacttccatttaaacctcagtggtgttaagtggaacaaaagctgaagttctgtccacttctcctccaaaatagtgttttaaacgatatccatttaccttgaaggctcggtcactatccagaggtgaaattgttactgtgccatagggaaaaacttctcaaacaaggaatggtccagaccaacgggattttaatttacctggaaaaagtcacaggcgagagttgtataatagcacttgttggctaggaacaaattcctttgagcggatttgattatcgtgccatttctttgtttttttccttgtatatctgggcattctcataagcggttagcctgaactcatctaattcatttagctggagcaacctcttttcattagctggggttagttcaaaatttaaaaactcggttgcccagatagctttatgttcaagttcaataggtaaatgacaagccttaccatagacaagctggaaaggggacatacctataggtgttttaaatgcagtccggtatgcccacaaagcgtcatctagcttcttggcccaatcctttcttgaagttccaactattttctctagtatgcgcttcaattcacggttggaaatctccacctggccacttgtttgagggtggtatggggttgccactttatgcttgactccatatttggctaacaagctatcaagctgcttgttacagaagtgagtccctccatcgctaattatagcccttggtaccccaaatctagtgaagatgttctttcttaagaatgagattaccacctttgcatcattggtgggcaacgcggctgcctcaacccacttggaaacgtagtccacagcaaccaatatgtattggtaggagaatgacttagggaagggccccatgaagtcaataccccatacatcaaaaagttccacttcttggatgttgtttaagggcatttcatctccgcgtgaaacattacttgtcctttggcagttatcacattgcatcacaaagttctttgagtccttgaatagtgttggccaataatagccacattgtagcactttgtgtgcagtccagtttgctccaaagtgacctccataattggaggaatgacagtgccacagaatatccggcacatcatgttcagctatacatctgcagataacattgtcagtgcattgaaaatatagataagggttatcccaaaagtacctctttgaatcatgcagaaatttcttcctttgctgccaattgaattcttcaggcataattttagcagctttgtaattagccatgctagcaaaccatgggttggtgtttacagcaagcacttgttcatcaggaaaatattcatttatttccacttccagtccatcttgtaagttcttttcttgaattctggacaaatggtctgcaaccttgttctctactccagctttatcccttatttcaagatcaaattcctgcaacaacaacatccaccgcaacaaacgaggttttgcatcttgtttatgcagcaaaaatttaagggctgcatgatcagtataaacaatcaccttagatcctactaaatacgatctaaatttatctaaggcatatataacagctagcatctctttctcagttgtggcataatttacttgtgcctcatttaagattttactagcataataaatcacatgcaaacgcttttctttccgctgtcctaatactacacctactgcataatcgctagcatcacacattaattcaaacggtaaactccaatccggagcaattaaaacaggtgcagtggtgagtttttgcttcaaaatattgaaagcactaagacaagcatcatcgaatacaaactcagtttctttttccagcagctggcttaatggctttgctatcttggagaaatccttgatgaatcttcggtaaaaacctacatggcctaaaaaactgcgaacaccactcacattaataggaggaggtaatttctcaattaataaaagcttggctctatctacctcaattcccatctcagatattttgtggcctagcaatatgccttctcgtaccatgaaatggcagttttcccaatttaaaaccaagttagtctcttgacatctttttaaaactttggttaaattagttaaacatgaatgaaaacaagggccaaaaacagaaaaatcatccatgaatacctcaagccctctttctaccatgtcagagaaaattgacaacatgcatctctggaaggtggcaggtgcattacacaaaccaaatggcatcctccggtaagagggcttgaggtatacccagagtaaatgggatttggttatacccagagtaaccatcaaggaaacaatagtaatcatgaccagccaatcgttcaagcatttggttcatgaatggaagtggaaagtgatcttttctagttgcgtcgttaagtcttctatagtcaacacacattctccagcccgtgatggttcttgagggaatcaagtcattgttgtcattttgaatgactgtcatacctcccttctttggcacagtttggactagacttacccatggtgtgtctgaaattggataaatcatgcccgcatctaagagcttaacaacttcttttcttaccacttccttcattatgggattaagccttctttgtggctgccttacaggtttaacatcactttccatcaaaattttatgagtacaaaaggaaggatttatacctttgaggtctgaaatagaccaaccaatagctgacttatgctccttaagtaccttgagaagtttctgctcttcatgccaatccagtcctttgttaataatgactggatatgtctcattcgctcctaggaaaacatacttcaaatgcttaggtaattctttcaattcaaccttaggagcatcggttggaatgtcgtcttccttttgctctagtttttccagtattggctacattgatttgtctgcagctgtcaagttggattctgcaaaaaatactgcagctgcattttgaattgctgcgtttccagcttctactgcataattccctgctgctgtagattctgaattctgctgcaatgctgctatattggctgaatatgatgtataatttactgttgcggttagtgctgtatctgctgcacatttttctgcataattggatgctgaagaaatatttattaagtcctcaatttcagctgtttttaagcttgttgcgatacctgcacaaacaacattatccaacacatctagccggaaacaatcatgttcatcagctggatgtttcattgcatcaaatacgttaaacacaacagattcatcattcaatctcagctccagttttccttgctcaacatctatcaaggctctagcagtggctaggaaagaccttcctaaaagtaggggaatttcactttccccatccatgtctagcacaataaagtcagcaggaaatataaatttatccaccttaactaaaacatcctcaatcactccggagggtgttcttatggacctatccgctagttgcaaagacactctagtaggcttaagttcagcaatacctagggacttacacatagataatggcatcaaatttatactagcccctaaatcacataatgctctccctacatttatattacctatggctatagggatgttaaaacttccaggatctttcaatttgggtggaagttttctttgtataattgcactacactcctcagtgagtgctatggtttcacaatctttcagcttatgtttcttagataagatttctttcatgaattttgcatagttaggcatattggctaatgcctcagcgaatggtatattaatatgcaatttcttaaacatatctaagaacctggaaaattgttgcttctgcaattgctgctttgtttgtaccggataaggaggcttttcaaagcgagaaaagtcccacttctttggttgaggtgcagatttttgttcttcaaaattttctgcagctttctcttttgatgattcagctgctgtagaatttttctcagcttccttcttacttgcttcaggcctttctggagtagataacaccttaccacttctagttgtgatggctttggcatgttctcttgggttcacaattgtgtcacttggaaattggccttgcggtctctcagctaattgttttgcaagctgaccaatttggttttccaagtttctaatggaagcatcttgattagttctgtgagcccttgtttcagatatgaactctgctattgtttttgacagctgcaacacaaccttttcaagttcagagggttccttgttgggaataggaaggggttgcaagtagttgttggatttgtaatccaaaccacctccttggaacttcctttggtagttgtttccagtagaataattgttgttccgttgataggactgctgctggtatggttggtgttgcctttgatcattccaaactctgtttacctgcacagggtcagcaccaacaagaatcgggcaaacattagattcatgctcaccttggcaatactcacagactatatgtggttggctagctgccacttgtgctgcagaaacttgcaatctatcaatcttcttggttaatttggcaagttattgtgccaaaattttctattccgcaagcattgcatcattagtggaaagctgaattggttctctctttggctgatgtgtcatactttcattctcattccgagccaaagagttaataagctcatatgtttgagctgctgtcttggatcttatagttcctccggctgcaacattaacaatcatacgagtttcaggagtcataccattaaagaatatacgtacctgcttacctacaggcatatcatattgtggacacctcctaattaactcttgaaatctattccatgcagcacatagggattctcttccattctaagtgaaattggtgatttcattcaccaaacgattatacttgtccatggaaaagtattcagcaaagaaccttgagactaagtcctcccaagttgagatgctattggatgtttgatggttcagccatctcaaagcatgtcctttcacagcaaagggaaacaagcttaatcttactgcatcgtctaagacccattggtgtcttatagtatcacagattctgagaaatctgtcaatgaagtcatgtgggtcttcagactcctctcctccaaactgactgtgttccaccaatgctatcaatgaagggtttatgtcaaaatgattggcttggattggtggtctcacaatactggagttaggtcttgtgaacattggagccagaatatcctccattagttgatcctccggtcgccgtcttggctgattgggttgttcttcagccatttcttcttctgactctaattctggaagtgaatcaaagtcgaatttctcagcttctctccttctttgtctagctagtcttcttcggattgttctctctatttctgggtcaaattccaattcctcagagctagttgaacctcgcataaaagcttggagaagcgattagtaacaaaatattcaatcacaaaagcttaaaattactgtaaaatccgtttgccaattccccggcaacgacgccaaaaacttgatggtcgataaatatggcaagtgcactgatcgttttcaagtaataaagttaggtaagtgagtatcgttctccacaaggattggggtaattccacagtaatattaacgaatgtgtttgaacttaaaacagaaaattacgcaagaaatgtttgattgattggttgtttgagtgcaaaaacagaaagtaaataaatgcagtaaataaatttgagaagttaccaatggaaagataattgtggtcaggcacaatccctttctgagtcctcctctttcacttgactgttatgtcaacttaatgtgcacacataataaatctctcctatattcgtaaatcctagataactagcgattcaaccctttaattcgatcgagaaccataaacctttagcgattctgtcaaactaagcaattaaagactatatcatgtgggttcctgttatgattgttcagaaaataagcctttcctttattagttaacccataattccttagtgaattaaccctttaatctgaatcgaaaacctaattccttagtgaaatctgtaacaccccaaaatttcagtccatttctagggtaaaatattaattggaggtagtacagaaaaatttaggaaaatgccggaaatgcccctggacattttgggaatgactaaaatacccctaggcatcttagcagggtatcttaaggagaaaattctataagtactctaagatgtttgaaaaatgatcagaatacccttagggtgacaattacagagtttccctgaacatttgtggaaatgacgattttacccctaggatgagaggtaaaattaccaaaatacccttcaggtcaaacactgaccaaatgattttagaaatttgtgggaacctcattattggataaaatgcttttagacaacatattattaacatggttgaggtcagaaaaccctaaacaataatttctaggcattttggaagataatctgaaaagagctcaatctagacaacctcaggtatcaaaaaattataataaaagtgtaaatataatctatggagttttctcttaattatgggagaaataagttgtctaaataagttagtttagtgattttaataattaaaatcaaataaggatcaataagaaaacagaatattgccattctatgtaaataaaggcaaattttgtacatttggccctagaaataagtcttgaccgtggatataagaaagaaaagcgaatagaatgcttctatatgaagagtgcacgtgaagataagtcaaggaggcaaggagtggtaaaatttcaaaccattagccaataaaaatcaagtagtaaaagctatgttgactaaaggaagactttgggaaaacaacaagctaattctcatacaacaagtcatgagtgctcttcaagaaataaaaggtaacgtacaagaatagaagagtaaagaatttggccacttgaagggttgaaaagtcaagcttaactttcattggttcatgaaaaaggcttaacagcttgtaagatgcaaaagtgtagtaaacttcactccttggaacacgtagccatttttaagcattatttcaaagatcccaatggtcaaaatctagatatgtaagttaggaatatgtctttaaaattccatgaagatccaacggtgaaccaattcagagtaagtattttattaatatgggtttttgggcaaaaagcaaaaattatttggcataaactaagcaagcattatttggcaaccaagaagcttgctacggtggaaaggaaggaaaaaaatctgaatagcctttgaataatggaatatcacgtggaatggccaaggaataaagtcaagcatggtgcagatttttttagaccaaaggaatctacattgaatgcaaggaagcaaaaatcaaattgaattcctccaagccattgagtaaccgtgcagcaattgttgaccaagggcttcaaactatcaaccaataagaccatgctatataaggacatgaatgaagtaaaattgggtcagccaccaaatagagaaaccgtgcagctccttcccttgccttttgtttttgttttcttgaaaccaaattacaaggaccagccgtgcatctccaaatggtcccacttgcttgccttagttttatttaattcttgttgaatccaaataacaaagcaaaccatgcagctccttcactctccaaaaaaaatttaaggcaccaaaccgtgcactttcctaagccccactacttgccttttgtttttaccttttagggaattacaaagccctaaccgtgtacccatcttgagctatcatttgcaccaaaagaaatccttccaagctttgagcaagctcacgtggagtaggaaccaagggaggctagcttgttcaaattgaggaaataattaaggtatgggggagtcttgctaaatagaatttaagtattagcttacctcaaattaatctctactttcaactaactaactacttgaattaagataaaattaagtaaaagtataagaggaagaaaagattaagagaatcaagtttaattaggtaggttattgggatgaatgaagcaaccataattaagctaagcacttaactttttattgtttaaaattatattgttttggatagttggttatgatagtttaatttctaatgttgtaggagtaaagtgtagtttaagaaaacttcaagactagtatgataaaccatttaacgttttatttggatggagaagaaaccctaattaagttaaatacttatcgtttattctactattgttttaaatgattaattgggatggtttaatctttaacattaagtggtggattagaatagtttcatctttaatatagtagaattagagttaagagaactttaaattaatatgtcctagtgaaagtcataaagaaactaaaattagttagggatataattgtggttgttgtaaaatctatagatgctgttaatttatttttgatgatgtttgaattgttatttgtaattctgtaaataaaattatatagttgctgtaaattaaagctggttaaataaatctgtatgattaatgaatctgtatgctgttattaaataaaattgtataaatctgtatgctgttgacgtggttaaaagctgtttgacgtacttaattaatgctgtatgcatgctgttgctgtatttaaattgttgtttgtgttgctatattcaaatgcttatggtggcatgatgaccgagatttatggaaaggagcattaagtggtgtgatatattgtgtgattcgtgatataggattgaagaaataaaagtttacaacttgattaatgagtacaaataatgatgttgtagtgaacaatgaagacataacgtgttgatgtgattaaaagaatgcatatgtgatgaatgatgagaaaataagataaaaagagtatccatacatgattcaaggtgatttgatttgagaagtatatcatgtgatgatctgggatgttgagatgagacgggaatgaggatggttaacagtatatatttggtgtgttaaaaaccattatctgtgattatatgatgataaaactgtacccttgtgatgttgtgatgagtctgggatgaaggccctgtgaaaatgactctgtgatgttaagggatgatgaaaatgaaataataaagagataaaatgaaccagttatgcatttcatacgcatatacccagtggggtatgagatgatgatgatgagattgttagatctcgtgaagaggagtgtcagataactaaactgagtccatataactagggggtagacgcagtgaggaccacaccaccatgatgatcacatggatgggagtgataatcctacgcgccactgagctaccctgaccggatggataagtttgttccactaaggtgagggtggggttatctgacagtggccacaattatttagacgttgctgtgatctcagtcatgcatcatataataagatgagcatgcattacatgacaattctgtgtgtaaaaatgacttatttatattttataattgtttacgtatatttgatctgtcgatgtttaaatttgatttatcatttggtctgttgatatttaaattttgtttatcaagactaacccctatttgtgtcggtggttgacacctatgatgaccccaaattatttgggcgagcagaaaagcagtgatatggatgttgtacgagaagacaggatgaagaatatgtgttgtttgtttgcttttgatgatctatgcttgtgctttattatggactgtttatatatgggactctggatatgtaataatgaatggaatatttggtatgaatgagcgtttggactatatgatttaaataacgcgtaaaactcttacaatttctaaattcgttcttaaatcgacagaattttcatttgaaccttaatttctaaattcatttttaaaatcaataaaaattcgttggaacttttatcctttctgttttcgaaaattttttagcaaataaaaaaaataaatacgtaataaaaagcgaagtagaagcggtcgtttcaaaatctatcaagttaagcatttaagggtcatattatgaaatctgcactcacgcatccctattcctaggtgatgaacgaatgttattcttaacaagtcagacattagaaccccaacgttcccattgcgaatcctaactctaaatacttaatcgaagcgatcaaattcaattaagaatagaaattaagaacagaaaagaataaaacaatcaaaacatattattcaataccagtcaaattacagaggaattctcagcagtttatggccttcccacaatataaagtttagccagccataggccccaagaatatcaaagcagtagtatgattcattgttgtgcacacactcagcttgattcttgatttctagggtttttggatgatgaagaatggatggacaatgtatactctggctattctggatgcctcaatctgtttcagaggcttaatatttatagaatcaattaattaaggtaacaaagcccaagacctgtgccaaattcgaattatatcttttaaatcaggaaatcagatcaataaggcacgacccgcgcgcgatttcgcgctacccgcacggcttattcgaatgtctggcgctattagcgtgaccctccacgctagccgtgtggggtgttcgagtcaattaatttgttctggtcttctgtggcgctgttagcgcggctacagcgctaaaggcgcggttctctcaaatagatggcgctaatcgcgtggatatggcgctactggcgcgagttgttcgagttgaatgctctggcttgttgtccttgacgctagtggcgtgggtttggcgctgatggcgcggtgcttacggcctatttacgctattcgcgtggactttcacgctggtcgcgtggatcattcgagattgatgccttcaattctgcacttggcacgatccgcgtgggacttaaaactttgttttcttctttctttttttccttgaactcctcttttggcctaaaaatgctcaattggtattaaatttgaattaaaaacaatgaagtgataaacttaactaattctaaactattttcctaattatttatttaaaatataacctaaaactaacctaaaactaggatgtgtttgcaacacatcaggaagcaacaagctgagaacaaagtcaagaaggaaggaaaagggaaaagagcatacatagcttgggaggacaatgagtcaaccacttcagattcttccatagaaaatgaagaagttaacatgtgtctcacctcaaccatcaatgaagatgatgatgatttgctaagtgaaggaagtgaggtaaactctgaacttgaccaagctattcatgtttttcaagagatgtatgaggaagcccaaaaacttgcaaaagccaacaataagctcaaaggatatcttagatggcatattgagaaaataactgatttgcaaaatgaaatttgcagcttgaaagaagaaaatgaaaaacttgtttcaagttacaaattgaatggatgtatgtgtgcttcttcctctagcaatgttgacaagtataagatgcttcaaaaggactttgatgattataaacaaagtcaaggtgaagagtatatgttgcttttatctaaaaatagttatttgattgacctcttgagaaagttttataaaggaaaatgcaacttggctgaaatgttgagtgtgcaaaaatatgctggagatacttctggattggggtataaacatggatcaaaatcttttggaaaaactgtttttgtacctccaaaacagaagaatcaaaagtggcaaaagaaatcaagagtcaacaaatattctggttttgggaaaactaaaaaatctgttacttgcaactatttatggagaatgggcacacatattttaaatgctatgctaggagattctatgtgcccaatggtgattgcatttggattcccaaagtaacaagaaaagctaacccttatggacccaaccttgagtgggtaccttccattaaaatctgatttgcattttgtaggtgtgtctaagggctaggacttcaacttggtatcttgacagtggatgctctagacgcatgactggagacatgtcactcctctcaaatccgactttaaaagaaggatgatatgtcacttatggtgatagtaacaaaggaaaaatcattggtgaaggcaatattgggaacaacatcaaagcaaagataatgaatgtgctgtatgtagatggactgaagcataatttgttgagcattagtcagctgtgtgacaaaggcttcaaggtaaattttaacaaagaatgctgcataatttcagatgggagaaatggtgaggtattgcatataggtaaaaggaaaggtaacatatatgttctttcaattgatcatgcattattccatagatcttcatgtctaatcagcaaggttgatgaaacttggttgtggcatagaagagcaagtcacataaacatgcatcacatgaacaagctcattagaaaagacttagttattggattgcccaaactcaaatttgagaaggacaaactttgtgatgcttgtcaaaaggggaaacaaacaaagaactcttttcaatgtaaaaacattgtttccacctcaagaccacttgaactacttcacattgacttatttggtccttgtagaaccatgagtttaggtggcaattattatggacttgtaattgtggatgattactctagatacacttggactctgtttttgaaatccaagagtgatgctttccttacttttagaaaaatggccaagcttactcaaaatgagaaaggatgtaaaatagtttcaataagaagtgaccatggtggtgaattccataatgaacattttgaaaaattctgtgaagagaatggaattaatcacaatttttcagctccaagaacaccccaacaaaatggtgttgtggagaggaaaaacagatctcttgaggaaggagctagaacacttcttaatgaatctaatctacctaaatatttttaggctgatgctgtaagcactgtgtgttatactttgaatagattacttataaggcctattttaaagaaaactccttatgaactatacaaaggaaagaagcccaacatttctcatttaagagtttttggcagcaagtgttttgtactgaacaatgggaaagaatcactagaaaaatttgatgctaaggcagatgaagcaattttccttggatattcattgcattgcaaagcatatagagtattcaataaaagaacaatgtgcattgaagaatctgtacatgtgatttgtgatgaaactaatccctctaaggaagaaaaagaattagatggtgatgcaggtcagctgaatgaattaattgatacaagcaatgtctcaaccaaaattgaaaaaccaagtgctgaaacaaatgaaagacccacaaatccagttcaaatgcctaaagattggagaacaacaagaaacttatcacttggcaacataataggtgaagtttcaaagggagtatcaactagatcctcattaaaaaacctatgttgtgatatggcatttgtttcacaaattgagcctaagaacattgatcaagccttgaatgatgaacattggatgcatgcaatgcatgatgaactcaatcagtttaagaggaatgaagtttgggagcttgttcatagaccttcatctctcaaacctattggcacaaaatgggttttcagaaataaacttgatgagagtggaatcatagtaaggaacaaagccagattggtagctaaaggatataaccaagaggaaggcattgactatgaggaaacttttgctccagttgcaagattggaaacaatcaggttattacttgcatatgcatgcctcatggatttcaaaatttttcaaatggatgttaaaagtgcatttttaaatggatacattgaggaggatatatatgttgaacaacctcctggttttaaagattttaaacatccaaattatgtttacaaactgaaaaaggcactttatggtttgaaacaagcccctaggcaatggtatgaaagattaagcaagtctttgcttgaacaatcatttattagaggaagtgttgataaaaccttgtttatcaaaaggcttggcaatgatttctaattggttcagatttatgtggatgatatcataattggttctactaaccacatgttatgcaaagatttttcttcagctatgcagaaagaatttgaaatgtcaatgatgggtgaactcacattcttccttggacttcaagtaaagcaaattgagaatggaacatttcttaaccaatccaaatactgcttggaaattatcaagaaatttgaaatggagaagagcaaggatgctgcaactcccatggctacatcaacatatcttgatacagatgaaagtgggaagaatgttgatgagtcaaaatacagaggaatgataggatcattgttatatttgacagcaagcagacctgatataatgcttagtgtgtgtttgtgtgctagatatcaagcaaaccccaaagaatcacatcttactgctgtcaaaagaattctgaaatatctcaaagctacaccaagagttggtctttggtatccaaaaggtgcttctttaaatattattggttattctgattctagataggaaaagcacaagtggcacatatcatatgctaggaagctcattgatctcatggcattgcaagaagcaatcatgtgtagcactttcaactgctgaagccgaatatatctcagctggaagctattgtgctcaaagcttatggctcaaacagcaaatgcttgattatggagtagaattgaatgctattcctttgctatgtgacaacacaagtgccatcaacatatcaaagaacccaataatgcactcaagaacaaagcatattgagataaggcatcatttcctcagggatcaagttcagaaaggtaacataaaggtagacttcattgacaccaatcatcaattagctgatattttcacaaaaccactttcaaaggatagattttatacacttagaaacatgctagggatccttgatgagagtaacattatctagcttgttctgtttgtggtttatatgatgtatgaaagccaacatgcctttaaatgctaatgtgtttgaatcattataaaaatgctgctaaaatgttctgtatatgttaaatgctctgtagtaatcgattacaccacgggttaatcgattaatatcattaaaactcaagtctagaacgaaattagtaatcatgtaattgattacataccaatggtaatcgattattcttcacagtctaagaaaacacctttctctggaataatcgattacacatcgggataatcgattactatgtctaaaagttcaaaacttcaaagtacgtctctctaggataactgattacttatgagaagtaatcgattacctgttatattaaaacaatgctcactcagtaataatcgattaccactcgggataatcgattacatattgttttgttactggttcaaatggatcaatgctctgaaacaatcgattacctatggaaagaatcgattacaagtcttctctaacctctgatccttagaataataatcgattttatagcaaaattaatcgattatcatgtttgttaaagaaaaacaatttgaactgaaataatcgattactctacgatataatcgattatttgtgctgttgcttaaaaatctgtcagatttttatgacttatcaaactgctcaatccattttaaaactgcgttctatgtcattaaaccgtcccaacaactatattttttgaaaatatggacgtttatgctttatttcttttctataaatagtgtcttgtgtaccttgcatcattgcacaacttttctttctctcttctgtattcttgttgtgtctagactgtaacccacaacttcttactacaaaatgtctgagcgtaattccaagagagtcaagaaaccaaagaggagacatggtgaatcctcatctaatcctcctccacctcaacctcaaccagcaagtagacttgatatatggttctcttctgagacagataagataaactatcttcaatttaatgccactaagcccgtagctactcccaaatacattgaattagattggttcataagacaaggattccaatttcctgcctatctagagtctcaaaatcttaggcggtttttggaaatgaagggtaccttctaccctgatcttttgagggtgttttatacctgcttgaagggctctatgcagggtgatatgaggtccaaagtaaaaggtgtaaccatgcacatcacccctgatatttgggaaactgttggtggaattgcttgtgaaggagctcgtagatttgatgaagaacctgagggctacaacaaaatggatacctataggagtatgcttcttgacacaaacatgaggcttaggaccagacttggcacaggtcctatgactgctgaagataggatgctacactacttcattacatacatcataactccaagagcaaccaatcatgcccaggcaactaatgaagatcttcagttggtgtatgggctgaaaaatcacattcccatgaattgggccttgatctttgcagagatcatgatgaagtcaaaaaggctggtgaattacccatttccatatcctgtttttgtttccaggctcattgatcatttcaacatagatgttgaaaatgaagtaatagataatactcttgcctacaatagccaaatcaaggaatcacatcttaccaagatgggcatgaggaaaacaccccaaggctgggtaatggctgcccaaattggtgctgcagaacacgaggaaatagctgctgattctgaggatgaaggacaacaacagcaacctaggcaagcacctcaagccttctctaattttgaatcccaaatgattcaaaaaatggatactatgccgaagcttcaagaggacttcaaggctgaaactcatgtagccttagaagaaattagggaaaggctggatgctattgaagttaatatgaatgatcaagcatctgctgaaatttaggataatttagatttagtatgatctgattcttattttgtactggaaaatatcatgttctgtttttacttctatttgtgttctgtttattaatttcattataaacttgccccatatgttagtctattaatgactctatgcaatttcagtattaaatccgctgtgctcacatcatttttgacttttaacaagccaaatagggggagaattgattaagggggagtagtttgatatatgctctgtttatccctgtttttttattcaaatttttgcccagaaattaatttgaagggatgctgaaatttagggggaattttaagtgtaaaactgaacctatactaatagaaacatgattgattgaatgcttcatgaacaacatgtgctttaacacttgtttttggccagattgtttgaaagttttcaggtttataatgcttgtcaaacaatagcttatgcaaattgatctccaagaatctttgcttaatcaaatggaagatttggtatggttaaagtcaaaaagggggagattgttgattctagtgaagccaagtatcaatgaatgaagatcaagcttcaaggtttttgactttcaaacatgcacaaaagataagctcaaaggaaaacttgaagaatcaatttgatcatttgtaaaaggaagtatatgatctgataatccaagtacatgcatcatgcatcattcattcatttaaaggtcattgaattaattgattaagtaaaagaaattgttcagaaaggcacttagaatgaaaagattttggaaaaataaagttgctattaaataatcgattacataaataagagcatcgattattttgttcttcgtgtgctttaaaaacaaaacatgatcattgtaatcgattacatctcggtttaatcgattactcaggcttttatgaaaaagttggaactctctgtcttaatcgattacaatagttgtttaatcgattacttgcctgaacatgcatcttaggaaaatataagctgactgtcttaattgattacttcacggaataatcgattatattgttctttgtctaaacccagaaaagctcaggataattttaatcgattacattatttccttaatcgattacgaggtttattttggaaaaacatgtgcctctggcttaatcgattacgtatcggaataatcgattaaatggttcattcttgaaactcagaatgttttataaatagattaatcgattactatcttgatttaatcgattacatatgctaaataatcgattactggaacgggtttaatcaattattttcagttaaaaagttgttataaatagaacctcttcgactgaggtttgtaacttttgatcatttgtgaaattttgaagtctaaagcattcacaaaaactctgagctttcattagtgagattctctgtgttctaaacatacctagcttcacaaaaatcatatgggttgttgaattaagaaggtgaagcatttgttcattcaaagactaagtaaagggaatgcattaagttgattatctgtcattcaattcgtgaattcatacatctacatgcattcttggattatcaggtgatgtgtttccttgttctttgatggtgtaatttgctatttgaattgtttgtaaagattgatctattgtatatgagtttcttgcaagtgcagagatagtgtttctctagttttttgctgagtagtgttcttggcaaaagggatttggtctctaagagtttaatagggttttagacttctgaactttatctagggttgataaagagagacttgtataattgcttgtaaggataattgttttgcaatagtggaactctactctagtgttgagtagaagaactggatgtagcctcatagtgtttgaggtgaaccagtataaaatctatggctaatctttttgttaatctcttcatctattaattacattgtttgtgaatcaatatcattgctcagaattctgtactctgttttctattctttgtgaaaaaggaatttgattgaatattgattgttggtattgaaacaatttctaaatgtgataaagatactgtggtaacactgattttaaaattttaattggacaaggttcaaccaattcacccccctcttggttgttttgaagtgttcctttgtttttcaaacacttgctgccaaaaactcttaaatgagaaatgttgggctttcttcctttgtatagctcataaggagttttctttaaaataggccttataagtaatctattcaaagtataacacatagtgcttacagcatcagcccaaaaatatttaggtaaattagattcattaagaagtgttctagctccttcctcaagagatctgtttttcctctccacaacaccattttgttggggtgttcttggagctgaaaaattgtgattaattccattctcttcacagaatttttcaaaatgttcattatggaattcaccaccatggtcacttcttattgaaattattttacatcctttctcattttgagtaagcttggccatttttctaaaagcaaggaaaacatcactcttggatttcaaaaacagagtccaagtgtatctagagtaatcatccataattacaagtccataataattgccacctaaactcatggttctagaaggaccaaataagtcaatgtgaagtagttcaagtggtcttgtggtggaaacaatgtttttacattgaaaagagttctttgtttgtttccccttttgacaagcatcacaaagtttgtccttctcaaatttgagtttgggcaatccaataactaagtcttttctaatgagcttgttcatgtgatgcatgtttatgtgacttgctcttctatgccacagccaagtttcatcaaccttgctgattagacatgaagatctatggaataatgcatgatcaattgaaagaacatatatgttacctttccttttacctatatgcagtacctcaccatttctcccatctgaaattatgcagcattctttgttaaaatttaccttgaagcctttgtcacacagctgactaattctcaacaaattatgcttcagtccatctacatacaacacattcattatctttgctttgatgttgttcccaatattgccttcaccaatgatttttcctttgttattatcaccataagtgacatattctccttcttttaaagtcggatttgagaggagtgacatgtctccagtcatgtgtctagagcatccactatcaagataccaagttgaagtcctagcccttagacacacctacaaaatgcaaatcagaatttaatggaaggtacccactcaaggttgggtccataagggttagcttttcttgttattttgggaatccaaatgcaatcaccattgggcacaaagaatctcctagcatagcatttaaaagatgtgtacccattcttcatacaatagttgtaagtgacagattttaaggttttcccgaaaccagaatatttgttgactcttgagttcttttgccacttttgattcttctgttttggaggtacaaaaactatttttccaaaagattttgatccatgtttatagcccaatccagaagtatctccagcatatttttgcacacttaacatttcagccaagttgcattttcccttgtaaaactttctcaagagatcaatcaaatagctgtttttagataaaagcaacatatactcttcaccttgacttcgtttataatcatcaaagtccttttgaagcaacttatacttgtcaacattgctagaagaagaagcacacacacatccattcaatttgtaacttgaaacaagtttttcattttcttctttcaagctgcaaatttcattttgcaaatcagttattttctcaatatgccatctaagatttcctttgagattattgttgccttttgcaattttttgggcttcctcatacatctcttgaatagcttggtcaagttcagaatttacctcacttccttcactcagcaaatcatcatcttcttcattgatggttgaggtgagacacatgttagcttcttcattttctatggaagaatctgaagttgttgactcattgtcctcccaagctatgtatgctcttttcccttttccttccttcttgactttgttctcagcttgttgcttcctcaagtagattgcacattcagatttgatgtgaccctgtttgccacactcaaagcatgtgaagttgttgtcaatcttcttgttgagattgttgttattgctgctgtttttgcttcctttgctgaaccttttgttcttgtttttcctcagaaatttgttgaacttcttcactaccaagttcacattgtcttcatcatcctcttcactagtttcctcttccttttcagctttaacaattgcagctttcaaggctatgcttcttgttttcttctctacatcttcacaagatgttaattgagacatttctaattcatatttaagaagcttaccaaataatgcagccattgacatttttgtcaagtctttggactccttgattgctataacttttggttgccaaggtcttgttaagcatttcaatatcttgatgtttagctccttagtgtcaaacacttttccaagacccaaaagatgatttacaatatgtgtaaatctggtctgcagctgtgaaatgctctcattggagttcatcttgaacatttcgtactcatggatcaaagcatgcttccttgaccttcaaacttcctctgttccttcatgagtaatttcaagcatctcccacatctcttttgcactattgcatctcacagtcctgaaaaattcatcagaggaaaatgcagaggtgatcatatttttagctttaaaatcatactgggcatttctttgttcagcctcagtcatctcatcccattctttgggaatcaactcatttgccacagttttctttggaataaagggacctttcacaatagcattccatgctcctgggtcatttgattgaataaagattttcattctatttttccaaaaactgaaatgttcctcttcaaacattggaggtctgtttaaagaggcaccctccttaaaggttatttgtgaagtattcatgattcctttttgaaagaaaaagtgatcttgagtaatttacaagaaccagctctgataccaattgataaacaaaggaacacttcaaaacaaccaagaggggggtgaattggttgaaccttgtccaaataaaattttaaaatcagagttaccacaggatctttatcactttcaaaaaattgttttaataccaacaatcaatattcaatcaaattccctttccacaaagaatagaaaacagaatatagaattctgagcaatgatattgattcataaagtaattataagatgatgagattaagagaaagattagccacagattttatactggttcacctcaaacactatgagactacatccagttcttctactcaacactagagtagagttccactattgcaaaaaaatatccttacaagcaattatacaagtctttctttatcaaccctagataaagttcagaagtctaaaaccctattagactcttagagaccaaaccccttgccaagaacactactcagcaaaaactagagaaacactatctctacacttgcaagaaactcatttacaatagactaatctttacaaaaattcaaagaacagtttacaccatcaaagaacaaggaaagatatcacctgataatccaagaatgaatgaacaatgaatgatattcaggttgaataacagattactaactcaatgtgtaaggaccctcacttttggccaggatcctttaaattagaaaactgagttttaggtgtggcgctgatcgcgccagtgttggcgctgatcgcgccatgccctttggcagtggcgctgatggcgccaaaggttccgccagttcacgtttgtagcgtggaaatggtgctggtggcgtggttaggtcgagaggttggcgcggctagcgccaagggccgcgcgggtcgcgccacaagtgccctggaaaaccaattttctctggattttcacgctgatagcgccagaggtggcgcgagtggcgccacagttctcaggaagttggcgctattagcgccggaccaccgacattgtggcgcggatcgcgccagacctcgggcaggctgactatttaagggcaaaacgcatttttgggagaggaaaacctcttcttcttcctccaactgtccaggacctccattatagcagctccaagctttcttagcccttatatattagccaaaacaccttcctgtgacctttgattgtgaaagaaactttcagaaagctataatccttcatcctttctttaaaaaccccatttgagtgagagtttgaattctcaagtgagaaacctcagagaacttgagagtggtcgagactcaaggcttggaacggacagagaagcttgtggaagctgtcctgaggccttcatagtcgccactgaggtaagaaactctagttctcttgattagatggaatttggggttttctgagtattgtgacccacactgaggtggggctagaattagcccagggtcctgttgagaaaattgttaagggcattgaatagatgaaggattagctttcagttttagattttgatgactttgaatcttggctctgtatatgcctgtgtgacttgtgtagagtcacttgttgatggttctctgatgggctagagccttgattgcgttgtgctgagcccaagtggctagttgaacgagacttggagtgaaactcagtccgttctagtgataattgaggttaaggctgaggaaactatgccatgtatgattgtgttttgagtccagatgactcagaggtttggctttcagccttgagggaccttgaatggtctgtgaccagccttgtgcggggctgagtatgactgaaccctaggataggggaattctgttatgatatgttctgtgaattggatgcctgagggcttattttgatatgagatttgcatgtgccttgattaggctttaattctgagactgttggtggcgggagccacaaacctgggaaggaaccgcagagtaatcccttaccaggtaagttcagtgttctctggggatgaattcccgctttggttgcacaccacactcctggggagtgttggtcatgattcatgctgcatgcattggctataacattgtttggattaattttatatgcaatctgcattagatatatgtatgctatgattgagatatctgttggccaatagatgaataccagcattgaggagctctacccagtattcaaggcgttgaggagctccgcccattggccaatagatggataccagcattgaggagctctgctgggtattcagggcgttgaggagctccacccatggcattgaggagctctgccatatcttgacaggtacaaacgttgaggagctccgtcagggcattgaggagctccgccaagcattgaggagctctgccacctgtcatgtgttgagatcatgtttatgttataattctgatatgttgggggccagagggccaggccagtgagccttgtttgttatgttgcctgcatgtatgatgtggatctgtgagccagggtgggaatgatttcccagggaccctgagcttactgagatatgttatctcaccccatgtggggaatttctatgatttcaggtgaccattctagaagagaagatcagtctcagggcaagaggcccagcagagactaggctgcttgactgaggagcggcatggagagcttgaaggctctattttgtttctgttttgatgtatagttctgtataccctcgaggagggctgttattcttttgtatcaccatagagtggtgtgaacactgatgtatatatgtacataactatttgagtttatgatatgagactttccctgagtatatatttgttatacatgtgacaatctgcctaggtattagttatctgtctttatgatgtttgttatgagaaactagattagcaggggcatgatatatgtttttatgtgtgtgtatctagtatattggttattccatacataatgtatcaagaaaagcgattctgtgcttccgctgagttttataaactatgttttaagtgctaatctgatattattaatgataacacgtcggaggcctacggggtgttacacaatgcattcctttccttaatctttgaatgaacaatgaagatttttcttcttgattcactaactcatgtgaatttgtaaagcttctaagtgtttagaatctcaaaattatcactaataaaggttcagagcgtttgtgactgcttacaattcgtaattctcaaaatactcaaaaattacaaacctcagcctgagaggttttatttataacagctttttaattgaaaataatcgattaatcacgctccagtaatcgattatttagcatatgtaatcgattaaaacaagatagtaatcgattaaaatgtttataaaacttcctaagtttcaagaacgaaccatttaatcaattgttccgatacgtaatcgattaagacagagacacatgtttttccaagataaaccttgtaatcgattaataaactattgtaatcgattaaaatgatcttgaagctttctgggttttgactaagaacaatataatcgattattccatgaataatcgattaagacagtcagcatgtctttttctaagatgcatgttcaggcatgtaatcgattaaccatatattgtaatcgattaagacagagagttccatcttttcataaaaagcctgagtaatcgattaaaccgatatgtaatcgattacaatgatcatgttttgttttctaaaggacacgaagaacaaattaatcgatgctcatattcatgtaatcgattatttattagcaactcaatttttccaaaaactttacttcctaagtgcctttcttttacttaatcaattaattcaatgacctttaaatgaatgattgatgcatgatgtgcacacttggattatcagatcatatactcccttttacaatttatgaaattgattcttcaagctttcctttgagcatttcctttgtgcatgtttgaaagtccaaaatcttgaagcttgatcctcattccttgatacttggcttcacttgaatcaacatttggcttgctccccattgtccctcttttctcttaagctttagcctaaatatccttttcttatccacctttccctaagccattcattgcaagctaataaagtccttttgatcttttgatgcatgtgtatttcaagttgaataaatgaaaggtttggcaatgcttggatgtgctagttgcatgtggtgtttgagtgtaaatacaagtcatacacgtcatgtgaggttgagtgccaccctttgagagaattttatcaccttggtgcattcttgattctaaacttgactactttttcactttgtgctttgtgatcatgttttcatggattgtttgttacctcaacattattcttccatctttcatctctcttacttttgtgcattgttatgatccattgaaaaatatgtttgccttgttcataccctttctttaaatttgtggtttactttagtttgaatttttctcttagtctttcttttagttttgcccaagagtgcaaaagtttaagtgtggggtattttgatagagcgcttttagttgactatttttctatccttcttagtttatttgacctctcttggacctttattttcctattctaattcagtttttggcctaggcaagtaagtgggcttaattgctaattgttgcgtattttcggatttctgactcacttgacgtatctgacttgtgaaggacctatagggtgctaccaatctgagaatggagcattctaggagtccctagaaagataatgaaaagatctacaagtttgctagaaatagaccgaggctaattctgtcatttagagggtcattttaagcttggaagttagcacctctgcacttgtaattttgggctgcgaatttgactttcatggttgtaaatagcaaataattagattgttgggtttgtttgtggcccattttattttcagaactcagtcactacatatattagtgactttattgaaacaaaaaacacacttttcattttaataaaacagttttacatttctctcttttaggtttttaggatcaaaactcttgctctcattttctctctactaatcttccttgttcttgattgttcttcatttttcatttttctgttcttccattttcgtgcactcaatccatggggctttcattgatgatgatcatggaaggctaaatcaccaatcaatccaaggaaccaacctaagcacaaggagaattggagttctggtttagtatttcgaattctacttgaatgttcatcttcttcttcaattgttattctgtttttcatgattatgaatgcgtttaggattgaaagcggattaggttatggattcatgcctaatttcgaatattaatcacagaataattggatgatatttcaattagggttgtggtttcaattaaattaggggttaatttgattgaacaacttctaatgagattgaatgaatgttcatgataggataaatttctgagaatgatgatgattcgaattgcttggtttggtgaattggattgatgcttctctaatctgttttactcacttgttgataatcttgttaatttctgcactgttctttaattttagtttacgtttttgcaagtcttactttcgcgcacaaattgtttgataaaattccccccttactgttattcgtaaattgaagctagaaccatattgattgtgtctctgagtcgacctaggttagctctgtgctacagaattagcttagtaaaattgttttggtgcgtgtcgacaacgtgaaatcaatgccttcgctgtcttcagtcatattcatttcttcaaacttaatactatcatgcatgcaatattcgttgtccatcttaataaacaaattcaaaataaatcaccattaacaaactatacacataataatcatattcaataaaattacattgttattttcattcagattcaatacattacttaaacggactaatataaattcaataacaaaaaataaacagctcacaaatatattaattaaaaatcatagaaaaaaactcaaataaaagtacatatggatcataaggattgtcaatccgtatgtattgtcgatgatcacagcaggtgcaggaacgtacctccgacggatgtccgacaaaccaaaaccaagtcacgaccacctccgctaccaccaaaacaacaccaccaactggagataaaaaattgtagcatagagccaacaaccaaccaaccaaaaaaggaacaaaagcttgctaagtgtatatgttttaagtaaaaaagacaaggggcattcttggaatataacatttttgctgggtgtataagaaaaaacattggtgtaggaagtcaaacccatatggaggatatatggcagttggcccaatagactgttgtggcccaatatcactacttgatgtcctacttgctccttccccttattgttacccccaacggtcacattggcatggcacgtgcatagagacccttttcctcagcattgggagaatgtgccaagtgatccactttttttaggccctctgtctcatactctgctactttctcccttttagacatacaatccccttattgttctaactggaatgatgtgtccattgatactattcctctctcaaaaggatatatctttgcttatagggactttcaccagaatcctagcatatgctagccctactgacttgggtttccaaaaagcaaccgactctttccaggtctagtgccgaagcttgctccaatctgacctagctggcgagctatcccagttcgtcgcctattacacggctcactaactctgcctggggtgtggggctacctattattcattcgcatctgatagagcgaagatcgtagaaggaccggtccagtcttgttaaatttgcagtgtctacatccactttcataaaccaaacgttgacaccacttttgagaagcatgccacattccaccattgcaatggtaacccatagcacctcaaccacaccattctactaccccaagttttgtcatactccaaggaacatttgaatcaaacattgttgtcaatcattcatcttcaccttccaaaatgtcgtttagattatcatcatcctccctagacagcaggaccacattatccccaagttaacctgccttaagggttttatatccatttgttatgaaggcctcatgtacctcacaaataactaacaggtctttgattcttcctatcatactcttttgtagccatgatatatttgttttccccaccacaatcctcctcccgtaaatgaatctaacccctaatcaaaaatatcttttatctgccacacttgttttgtgttaatactttttcgcttcactgattgcgcgtaagatgttgcacatccgctgctataaggagtaagctcagggggtaagagtgttgcttgcttgcttgtgtcgcagatcagctgctagaatagggtggttcatgctttctatataactcattgtactctaaggcaaaggttgtaaccatgcatcatgcatattgttaatacacttcattcattgtaatttgttgttaataggttttaatacaattgttagttagttttaagtacaactattagcatagttgtcatcttctgacttgtatatatattcttatgccattgatgaatacattagaggaatttatcttaccaattcattctgttaacatggtatcagtttgttagagaattcctctccctcttgctgttctctcttttctttgctttgatcggtgatctccttctcatcctttttcgtggcttctactcccaggacctctgattcttctgttacggtcacctcctccataaccaattctcttcctcaagacatctctaacccttattatgttcaccctaataagaatccctctgtgaaactccttatttctcttcttgatggttttaattaccatggttggcctcaagtgatgacaccggtattaaagatgaagaacaaaatcagctttgtggatggcacgattccaaaacctaatgagcaagatccaaattacagtgattagaaacggtgcaacaacctgattcagtcatggatcaatcattcgatttctcttgacatcacaactagcattctatggctaaatgaagcttctgagttgtggaatgctttgcgtaaccatttttcccaaggtgattgcgtacagattctacaattgaacaacaatctctattccattaaacaaggtgatctttctgttacaagctatttcaccaaattgagaattctatgggatgggttgtgcaattttcgttcaatccctacttgtgatgtgattcttgttggttattgcaaagcggttcagtttttcaagaagtatcgtgattctgatagcattttatgatttcttcatggattgaatgagccatttgcttctgccaaatgtcaaatattgatgcttaatcctcttcctagtttgataaggttttctcagtgattcttcagcaagaacgttaattgcatgttggtgttatgcctactcccactgctctcactgctcaggcctcatcaaatacatcacaaggtcatggcaaggcccctttcaagttcaattctgccaaacaaggtcatgctcgtttattcactcattgcaatcagactaatcacaccatcgacacatgttttctgaaacatggattccctcttggatggaaaataaagaaatatgtgcataatgttgcaattgctaatcctcaacctaaggatgattcagacactgctggcattctttctagcctaaccaaggatcaaattcagaatttgctttccttgttaccatctactacgcctactgctaatgctaccagctctttaaatgtggtttacccttccaaccttatcagctctaatcacatttctactcagcctgatacaggtaatgtttcttggatcctagattcaggtgctacggatcattttgtttgttctttgaatccttttacatcttatagagccattaaacttattccttgtgcattacctaatggcaagtctgcatttgctttgtttagaggcactgttgttctaactgattctttaactctttatgatgctcttgttgttgaacatttctgtcaacattatttctattaccaaactcactaaaagtcttgactgtcaagctactttcactcacaacctctgttttttgcaacagatttctggccagaagatgcttggcactgctagagagtttaagggactatattattacttgatataatctggtgcttctgattctaattatgtttctaaaattcattttactagtacttacacacacagtctttctttttccaatgtatgacactatagattaggtcatccttcatcttggtgctatgatactatttagaagattaattttaatattccatctgttataaataaaccttgtgacaattgtcatttctctaaacagaggcacttatctttttcatctagtactactatcactaattgtgtttttgattttgtgcatgttgatttttaaggcccctattcggttccttccatatagggccataaatatttctagactattatagatgaacactataaattcactaggttgaaactcatgaaatcaaaggtttaaactagacagcaccttgttgatttcgtgtctttcattcaaacacaattaaacaaaacaatcaaaattatagtgataatggtgttgagttttccttgtcttttttttatgattaaaaaggtattttgcatcaacaatcttgtgttgagactcctcaacaaaatggagtcgttgagagaaagcaccaacacattcttaacattgcaaggtctttgatgtttcaatcacatcttttcctctctttttggtctttttcagatgcccatgatgtctatattctaaacatgttggcatccaaaattttaaaatctaaatcacctcatttccttctttataatgccaatcctgattttcaatccctaagagtgtttgggtctctttgttttgcatccactattcaatctcatagaaccaaatttcaatctagagctcaaacatgcatttaccttggtcactcatttggcaccaaaggtgactcttatataatttacaaacaagagagttcttagtctcaagacatgttttctatgagaccattttttcctttcatactacctctcctcctctttcttctattgacagtatgtttacttttcgtctcccatttttttatactgattctgacttgtcctctttaccaaccaatcctgtttcaaaaacagctttggcaaaattatgtttcattctcgtctgtacctcagacacaaatcctatttctgctcctattaattcaggtcctactagaatatctaccagaatcaatcacccacccacttatttgaaggattattagtgtagtgttatacatactcttagtactgcacattcatcttcaggtacaccttttcccctttcccaatttacttcctttcatcatatatcatcaccacatgaagcatattcattatccttgtccattgtttctgaacctcatacatatgcacaagctgtgaaatataattgttgacaagaagcaatgaataaagaaattgaagctttacaaaacaataacacatggatcctaactaaattacctcctggtaagaaacctattggttgcaaatgggtttataagatcaaaatgaaatctgatggtagcattgaaaaatttaaggctaggttggttgccaaagggtacactcaattagagggtgtggattatggtgacactttttcacctgttgtaaagctcactattgatatcctcgtgcttgctttagctactacaaagcattggcatttacatcagttagatgttaataatacttttttacatggagatttgatagaagatgtttacatgaaagttcctcctcagtttacaactcctaattctggactagttttcaagttgcaaaaatatttatatggattaaaaaacaagcaagtagacaatgaaatgctaagcttactgctaccctcatttttttgggtttcgatcaatcttcttctgattattctctatttgtgaggagtcaaaattctaatattaccattctcctagtttatgttgatgatgtagttttgattggtaatcatcttgaagaaattaattctatcaaaagttttctggaccagcagtttaagattaaggatataggaaaacttaaattctttcttggcttggaggtggctcggtccaagtctggaattgttttatctcagcccaaatatgccttggagttaatcacagatgttggcttgttaggatgcaagcctatttcaattcctatggtacctaattccaaactttctgctagagttggtgttatcttatttgatccagcaagttatcgaagacttattggaaggctgatatatttgactaataccataccctatttatgctttgttgtgcataaattgagtcaatatttgtccaatccaacacagtcacattctgaaatacatcaaaggttgtctagggaaaggtcttttttctcttcagctagtgactccaggctttgaggtttttgtgattcggataaggcagcttgcctagaaacaaggaaatctattaccggtttttccatcttctttggttcctatcttgtgtcttggaaatcaaagaagcaacctacagtttctcgatcatcatttaaggctgagtattgggccttgacaatcattgcttgtgactttaatggttaagatatttgctcgctgatatgcatcaagaaacttctctgtcgataactctatattgtgacaaccaatcttccatcaagctcaagatccaatgtttcataagtgcactaagcatatagaaattgattgtcatctaattcgcgacttttagaagtatacgatggataaggtaggagagaaaacaaagtgaaatatgaactgaaatattattctgaggaaatgaaaagttaatctcagttagttacaagagaggtatataatcctcttgaacagaaataactaactagcataaaactactaattgtctactacctaggtgttgttagcaaaagctaataaacttactaactacctaggtgttgttagcaaatgctaacagactttaacacaagaaagacaaaactgtttttacagttttaaatacatattctaatatccccctcaaactctaggagaagggttttcaggagaaacacacttcacattgagtttgctccttagaaacttaaatcttgttgaggacagaggcttggtcagcacatcagcccaatgatccaaagttggaatgtgtacagctgaaagttgtttagctagaagtttttccctgacaaagaagacatcaatttccatatgctttgtgcggctatgaaaaaaaggcttgtgagcaatggagacaacactttgattatcacataacataataggagttatgaaggaaacttgtaattttgttagaagagcatgaatccaagtcaattttgcggaggtttgagccaagctgcggtattcaacttcagtactggatctagctatgactttttgcttgcaagaccactaataaattaaatttgggccaagaaatatagcaaatccagaagtggatcgtctgtcatctacatcagatgcccaatcagcatcacaaaaagcataaagaaccaatggctgagtgatgcaagcaaactaaaggaaaagcccatgaaatatagtgcccttaaggtatcttaaaatccttttaaccactgcccaatgagagtcaagagggtcatccataaattggcaaactttgttgatagcaaaactgatttctggtctagtaagggtagcatactgcaatgcacccactactgacctgaacaaagtagggtcatgaaatagattagcatcatgtttggattttgcaattggagaccataggagaagaaatagagtgagctttagccatatgagtcttgtgcaacaaatcacggatatacttagtttgataatagagtgattggacagacacttgatctcaagacctaagaaataatccaaatgcctaagttgcttgagggaaaaagcactgttcaattttgttgaaagctgttgaatcagtgcagttgaattcccagtaataataatatcatctacatactgttatgatttttacggcaaacgcaccgtgttatcgttgcaagttacaaaatttataaagttcgtctccacaaggatttgagtttactttggctagtttaaatctttaccagtttagtagtctatgtacagatgataaaagcgaaggttcatttgtgtgatttgttatcgtaaaataaagataaaattacgaaagtaaataaatgagttcaagtcaaagaagtgtaggattggattttgtcttacttatcccttcgattaattctacctatgcattatttttctattcttattgacacacacgtttaagtaaccctaattcgattcctcgcaattaaagtcctaaggatattttactaaatatcgattcctcgcatatttaattaaatacccaagcattaagattatattcacgtgtttaatgcaatcaaaacgttatgccctattcctatcaaagcaatgtaatgagtaaattcattcagttcaaaccctaagattactttccagtctcacttaggatttaagttcatgatactagtgatcaagtagaatcaagcattaagcgcagaatgaaattaccaacaagaaatagaacaatgcataaatataaattaaaagagtatagggataagaagagtacgtccaatccttagagagtttaggcattcatcggaagaacctcctcaagagaatgactgacgaagtagcttgtcatcgatccttttttcggcagaatctccactacaaaaccttactttctcacttccctaactctctactataacctagaagtattcctaagcctaaaacatgtattaagtagttaaaatggtgcctagaaacatgccatgcttcacaaatccatggggtatttataggatattgcctcctgcctactttggtcgcccaggcgagtggtttcttcacattttggtcgcctgggcgagctaacccttatccccttggaacttgcagctcgcctgggcaagcaaaatacacatggtttggttgcctgggcgagttaaagtcttaaggctgaagttttctttgggctaagttggttcctgggcctggtttgcttgttacacctcccctgcttgctatgtgagcccttcttgcttgttttgattatccggaagcctcgaaaatccacgaaatctatcaaaatataaaacatgattggattaatcttccaaaacaacttaaaaacaagtattagatgctatttaactaggttttagggaaatttataagctaagttaatgaaatcaaaagataagtgccagtatttgaaacatgaattttactgaaatgtggcacttatcacacccccaacctagaatcttgcttgtcctcaagcaaagtaactaacactaaaataaataggagtataaaagatgaacatgttttgtaaagaaccaactttctagagtgatcagaacatattttcaaaaatagtcaacctcgagaatttgaaacaaaacatagagttcacaaattcaaatgagattaagatcaattcacatttcatttctaaagaacatcggaggaaacatgtgattgattcaaacagaggaaaacctctcaaaagtgattaattctcctacaggtaagtgtttattctcaaatacatcattgatctatcatagatcgattttgcagttcatttcccatcaaatcaaagtgcatacttatcatggatcattaaagcttttagggttgggcctggctagaaaggaatcttggtttttctggatattcaaaaagtaccttgagaataggagagcaaataaagataaaaatttagatcatcacttcctatttttcttttccaagatatccatgtttatcaatctttttattcacccaacttcgtatcatttaaaacacaaggatttttgtttcctttttcttttttcttttcttttttctttctttttcttctttcttttctttcatatgaatagcatatagccatatttaaaaaatcttttccatcacatgagctacctgtaacaccccgtgtgcacccggtgtattaacattatgattattatcagattaacgcttaaacactttaattaaaaagcttgcggaagcataaatcgaaaaccatatttcttgattacattatgtatggaatataaagcatcaccacacaaccacaaccacaacaagccccttctgatccaaaacacaaaccataaccataggcagataaccacaaattatctcaacagatataacaggaggaaacattatagacataacataactggttatgtacatatacattatctgacactcaaagtgtctatacaaaagaataagcatccaaatgcttctgatctcacagatccttcctcacacaagggcatacaaggtctatacaaatacaaaagaatacatgtgtacacacacacgtcttccccctacaggggtacaaaacaacatcaaaaagctgagccaccaagctctcctcaagctgcctcacagccaagcatatgttgtctctactggggcctcccgccctgagaccgctcctctctaccagaagcgtcaccagaaaccacataagccccacacggggtgagataaacatctcagtaagcttagggtccttggaggcatctcctccaccctggctcactctccatgacacaagtcatcaggcatcacaaacaatctggcctctcggccctcataacaatacaagcaagtcatcttgctctatgtacgacggatctcatcaacgccaacctcagtgtgagaccgtaactcacacccgtgccatcccatcgggagttaccccttacgcatggacgcacgtatatggtacctccgagaataggcaatcaaccgcgacgggacacacctatctcttggtcttgagggatcaccgacccctgggatctcatcaaccatgagcacaccaaactaggaggaaacccatctcctagggaggtccatatctatctaactggccagaagatctaatgttagcgatttaatatgctcacaccacggcaagtgcactgatcgttttcaagtaataattttaggtaagtaagtatcgttctccacagggattggggtgatttcacagcaatactaacaaatgtgattggaagtaaaacaaaaaatatgcaaagagaagtgttgttgattgattggtgattggagtgaaaacagaatttaaataagcagtaatttgaattaaaagattaccaatggaagagtaattgtggtccggcacaatcccctctgatccctcctccttcacttgactagtttgttagtttaatttacacaaataataaatctctcctaaattcgtaaatcctagataactagcgattcaaccctttaattcgatcgagaaccctaatcccttagtgattctgtcaaactaagcatttagagaatatatcatatgggtttattgttatgattgttcaaagaataagccttttctagattagttaacccctaattccttagtgaattaaccctttaacctgaatcgaaaacctaattccttagtgaaatctattagttttaagcatttaaaagatcatattatagtttctgcagccacgcatccctatccctaggtgatgaacaactattattctaaacaggtcagaaattagaatcccaatgtccccattgcaaatcctaactctagctacttaattagagtgatcaattccaaataagaatagaaaataaatgcagaatagaataaaacaatcaaaacattgttattcaataccagtcaaagttacaaaggagttctcatcagttcatggccttcccacaatacaagatttagcctgccataggcctcaagaacatcaaagcagtagatgaatacatagttgtgctgaaaccctagctttgattcttgatttccaaggggtttagaaagatggagagagtgtattagatgaataatgaatgataaaaggtctcccagtgttttttattagttcccagaggccttgtatttatagaatgatttaattaaggtaacacagcccaaaacaaagccaattttcgaaacagataatttaaaacaggaaactggatcttttccacgcgacccgcgcgcgagtttttcgaatgcacgacgctgatcgcgtgaaacgccacacggatagcgtgaagtcttcgagcctggaggtctaatgctgagcatagtggcgctgatcgcgtggatgtggcgcggtccgcgtgacttgttcgagttgaatggcttttaattctatccttggcgcggatccggcgttgatggcgcggtacttgcggccttaccacgctaatcgcgtgatatcccacgttgatcgcgtgggatcttcgagactgaagccttctattcttcatctggcgcgatctgcgcaagttcctgcgcgatccgcgcgggacttgaaaccttgttttcatcttttctttgcttcggactcctttttttaacctgaaattgctcaattggtaatgaatgagattaaaaacaataaattaacaaacttaactaattctaacctattttcctaattatttaactaatttataacctaaaactagcctaaaactaaggtgtgtttgcaacacatcatctaacaacaagtaacatacatttctcaagcataaatgcaagcatacatatcattatgaggatgcaacaaccatcaatgcatgcatcatgaatgcaaccatcactccctcgaagtatggtggagcacaagcagtgggaaacatccccaagggtccaagaacttacctggcaaagctaagctctgcagttcttcccttgctctatggcccacaccactaacaccctcgatgtcacgccctaaacaaggcatacaagctcatatcaacatcaagtactcaattaagcacaagcataaagcacggttctcaaccgtctcaatgaaaggtacctcattcctttccaaaacctctaagtcctctaacttaaggttcatcaaggctcatcactcacaaaccatctcatagaccctcgacggtctatctcatctcaaatatggcattagagtcacctcagactcaacacaagccaaacacaatgagctcaaagctctcaatagcccaatggctcaagggtccacatatggcttgaacggttcttatcacacatgagacaccgttcatatggcctctcaggcacatccataccatatactaaggctcttgcatgtcacaacatagccaagcaactcagcttatcaaccatacatacatatcatagagccacaactcaaagttcaccaaactaacatatgagagctaatccttcatcctcacaacattctaaacacatgtttctaaaggacccaaggctaatactagctctatcacaagtggatcactattcacccaaaaccccaactcacaaatcaagcggtgaatctcgagtttcttacctcaatgacgacaaggaaggcccaaggacaactcccccacgcacgggtatccacgaatcgtcgctgttcctcgccgaactcgagttctacagacttcccttgagaaaaggattctcaaatgtggagtttctaaggggaatatgatgaaggattcaagctcaccaagtgttttccaacacaatggaggtttaaggaaggtgatttggtgaacaaacaaaggtcaaggaagcttgagcactcaacaatggaggtgggtcgctggaggaagaaggaaggaagtgatttgggtcagatttcgtaaaatgaccccttatatagtgggtctgcccgagctgtcgcgctgatcgcgccagcttccacagcccccggtgccaaccgcgccactcccgggccaacagcgccatcctccagtacctgcggcgccacccgcgccaacctccagaaccaatggcgccacctgcgccaacatggcgccaatcgcgccccctgcaaagaagaacaggtcctctgggttgtctggcgccacttgcgtcaacctggcgccccaggcgtcaacccccagaacctatggtgccactcgcgccacataccagaggcatggcgctgatcgcgccacactggcgccatccacgccacacttctgcaactggtttctgcagaagaattctacagaaaaccagcgctatccgcgctgattgcttgcgccaagactcagggttattatactacccaaaaagtttccatcaacaaaatattccctttttgctctcctaaccttaggtaaggtaggaaaattcttctcttaggttagggttccaacaaaatatcaagtgtttggctcaaaagggtttgcaaaggataaatcattatatatattgggatagctttttggctagtggttttaagagatgtttaaaaaaaaagaaggcctaaatcatatccatgcatcatatgttatgacaattagaaatttatgcaaaatcaactatagattttatcagtgaggtcactcaatataatttctgtggttgcacacactcacttgggctcaaggtctgttttcatgttcaaattaaatcaatgtttcaaaagatgttctttatcaattcctttgtaaaaggacttgccttcatttgatatttgaaaacccattcctttgtttctcattctcaaagttccaaaaatcattttatggtgttctgataaaaagcaagtttcaaaatatttatctgttgattcttttcaaaacatgaaatatcagttaagccccaaaaagatttatactggcatacttaataaaacaaaaagtttttaacatgtgtattttcaaaaagagagaaacctctgtatgccagcaaaaagaaggaaacatagtaactaaataaacaaagtactgaattaaaactacaaagcaataaagaaatttaaaaacaatgtcactgatttttgaagatcgtggctgagaagcttgatgtcctccattcagataatcaataggatctgccacgttctttttcttcacttgctttctttaacaaaatggacatgtatccaagttcttaacaaaatagatgatattttcaaaaagataagatataaacaaaataaaataaagacaaaattaaaaaacactgggttgcctcccaggagcacttcttttacgtcgttttagctggatgagtttgctatggctttggctcccagcatttggtcaatatggatgagccattggcttctgagtctttcgcattcattctaaaacattcttttgtatttgtgggatgctctatgtcttcaaaaacattgaactgaatttcattattttgcactctgacagtgagctttccttcatcaacatcaattaaaactttggcagtcttcataaaaggtctgccaagaattaatgaaacttcattgtcttcatccatatccatgaatacaaagtcgactgggaagaagaatttgtcgactttcaccaacacgtcttcaatgacgccatagggatgcttaatggttctatcagctaactgtagagtcatcctagttggtttgattataacctctcctatcctcttaaccatggataatggtatgagattgatgcttgcacctaagtcaagaagatattttcccacagataagtttccaatagttacaggaattgtaaaactacctggatctcttgatttttctgagatagtcttttggatgatggcactgcatcctatatcctgctcgattgtctccttgtcagtgtatcttcttttcttggtgaggaggtctttcatgaatttggcatatgttggcatttgctccaatgcttcagcaaaaggaatatttatctgaagttgcttaaagatgtcaagaaaacgtttgtattgcctttcctttgttttcttggatggagcgtgtggatatggcatactttggactggtggtggggtcaaaacagttttgcctttatcacttcttttctttttatcatcacttgttacttttctctcaattttttcatttgtttcttcctcatccttttctttttctttttctatattatctatatttccttcatttttcttttcttctttttctttcctaccaaccacaattccccttcttgtgataatggcattacattgctccttagggttgacttgggtatttgctgagaaagatccacctccatgctcagctacttgttttgcaagctgccctatttgcacttctagatttttgatagaagcctcattattcttttggttgctgatggacatttgcatgaactgagtaagagtatcttccagctttgtcaatctgttaaactgatcttgttgcggcatatttctatttgaagaacctggaaaagaattagaagaacttgcaaaagaattgttaggaagacctgcaaaagttgggttagcgggaacattataagcattattattttgcctccaattataaggttgattagaacctagaccattgaggtaaccttggtaattcccttgagatcttgattgattttgcatgtagtgagcttcctctttttgtggacaatcaccatgtactgaacaatggccattctgatggtctcctccacaaaagtcacatctcaagatttgaacttggtgtgttgtatgagatttatgtgatcctccatgctgaatttgatgaagttggcctatttgctttgttaaggcctccaattgttgtgttaagagcttgttttgagcattttgaggaagttggcattttgagtgtcaagctctagtactcctttcctctagtactcctttcctctaaattgatgatctatcatggtgagattgatagtcacttgctactatggagtcaatgatcactatggcttcttcggggcttttagacatcatggttcctccagctgaagcgtcaaggatcatcttggtctggggcctcaaaccactataaaagatgtgtaattgtgcggcttcatcaaaattgtggtttgggcatctccttagtagtgacttgaatctttcccatgtttcacataatggttcatctacaccttcagagaaagtggcaatagctgactttgcacttataaatcttgatggagggaagaatctggcgatgaatttctcctccaaatcgtcccatgtacttatacttttgttcggttgtgattgaagccaagttttagctttacctgtcaaagaaaaagaaaagctctgaggtcaacaacttcagcatcttcgtctgatgctcccattgtattgcataattgatatttgctttgtcgagaagcatcaaaaacaattttactaagctaattctgtagcacagagctaacctaggtcgactcagagacacgatcaatatggttctagcttcaaatcattggtaataataaggggggattttgtcaaacagttggtatgcgtaaagtaaaacatgcaagaacacaaactaaaattaaaggaacaatgcaaaaattaataagattatcaaagagtaaagtaaaacagattagaaagcatcaatccaattcaccaacccaagattttcgaatcatcatcattctcataaattgattctatcatgaacattcattcaatctcaatagaaacagttcaatcgactctactcctaaattaattgaaaccacaaccctaactgaaatatcattcaattaatcttgtgattatcattcgaaattaggacatgaatccataatcctaacttgctttcaatcctaaatgcagtcataatcatgaaaacataatagaaattgaagaagaaggtgaacattcaagtagaatttgaaataccaaaccggaactccaattcttctcttgcttgagatggatccttggattgattgatgatttagccttccatgatgatcaccaaggaaagccccatgaaatgagtgcagtaaaataaaaggatagcaagatgaaaatgaagaagatgaagaacaatgaagaacaaatgagagaaaataaagaacaagagtttgatcctaaaaactaaaagaaagaaaagtaaaaactgtttttattgaatgtaaaagtgctatccaagttttcactaaagtcactaatatattagtgactaagttctgaaaatagaatgggccataaataaacccaacaatctaattatttactatttacaccactaaaagccaaattcgcagcccaaaattacaagtgcagaggtgctaacttcaaagcccaaaataaccctcaaaatgatagaattggcctcgggctatttccagaaaacttgtagatcttttcgttatctttccaaggactcctagaatgctccattcggagatcagtagcactctataggccctgcacaagtcagatacgttaagtgagcaaaaatccaaaaatacgctacaattagcaattaagctcacttacttgcctaggccaaaaactgaattagaatggaaaaataaaggtccaagagaggtcaaataagctaagaaggatagaaaaatatttaactaaaagcactctatcaataattccatgaaagtagacaagtgcgtgtaaggatcttcatggtctagcccaacaaatggatgtgagccaatgcgactgagtaatgctggcttcagctccacaaccttgttgttaaaaggagggatgactgtgctattgtagtccttgggaccttgttgataagcatagtcaccaagagttcttctttctggtctattttcttctccaccacgatcagccatgttgtcttttaccactggtttttctggagatagaggatcaatagacacagcttcctcggaatgtttgttggattcttgcttctttttctttctatttttcctttctgttttagagatttctggatcaaactgaggtttatctgtagaagacttacctcacataaagtgaaaggacgaaaactacaagattctgttgagtaccgagttttaataacaagaaaatatatacaaaacaagaaaataaagaacaagaaaaaaattctactaaactgaaatttaaacaactaagtaaacgaatccccgacaacgacgccagatgcatgttatgatttttacggcaaacgcactgtgttatcattgcaagttacaaaatttataaagttcgtctccacagggatttgagtttactttggctagtttaaatctttaccaatttagtagtctatgtacagatgataaaagcgaaagttcatttgtgtgatttgttatcgtaaaataaagataaaattacggaagtaaataaatgagttcaagtcaaagaagcatagcattggatttcgtcttacttatcccttcgattaattctacctatgcattacttttctattcttattgacacacacgtttaagtaaccctaattcgattcctcgcaattaaagtcctaaggatattttactaaatatggattcctcgcatatttaattaaatacccaatcattaagattatattcacgtgtttaatgcaatcaaaacgttatgccctattcctagcaacgcaaagtaatgagtaaattcattcagttcaaaccctaagattactttccagtctcacttaggatttaagttcatgatactagtgatcaagtagaatcaagcattatgcgcagaatgaaattactaacaagaaatagaacaatgcataaatagaaattaaaagagcatagggataagaagagtacgtccaatccttagagagtttagacgttcatcggaagaacctcctcaagagaatgactgacgaagtagcttgtcatcgatcctcttttcggcagaatctccactacaaaaccttactttctcacttccttaactctctactataacctagaagtattcctaagcctaaaacatgtattaagtagctaaaatagtgcctagaaacatgccatgcttcacaaatccgtggggtatttataggatattgcctcctgcctgctttggtcgcccaggcgagtggtttcttcacattttggtcgcctgggcgagctaacccttatccccttggaacttgcagctcgcctgggcgagcaaaatacacatggtttggtcgcctgggtgagttaaagtcttaaggctgaagttttctttgggctaagtcgattcctgggcctggtttgcttgttacacctcccctgcttgctatgtgagcccttcttgcttgttttgattatccgaaagcctcgaaaatccacagaatctatcaaaatataaaacatgattggattaatcttccaaaatgtaatgtcttgaattttaagcacgtaattaagcctggattaagcccatgattaagagcaataattgggtttagagtaattagagaaaaggcttgaaagagagatgaaataggctgtcctggcctgtggcgccacccgcgtgaagtgcggcgcgatccgcgccatatgtataaatcaggccaattggctctatcatctcacgctccaagcgtgggagttggcgctcccagcgtggacgggccgaggttttggcgcgatcagcgcggcgtgtggcgctaccagcgccagaggcctgaaagaggccatttctttgtcatctcacgctcccagcgtgggatccacgctccaagcgtggcttagcagagcatctggcgcgacccgcgtgggaactggcgcgagccgcgcgggaccgacggatttgcttttatataaagccctttgggctgaaagaggaaagaaaagagaaaagaaaggcaagagagagaaaccttcattgacgtgctttgagagcttcatatcttacccatctctcatctaaacaccttagacccaactgagaaagtgttcagagcgtcgagataagctagtgacttagcttgattctcgagaaaagtcgacttacggcgagatcgagattccaaagggagtttttggaatcgaagaaccaggaccagaggaggcttggctaagcgagttgtcttagggaaaggggttccctagtgtgtttgagcaacacggaggtaagaaactcgagctctagccgttggttctgggtttgggtctttggttagattttgaacatcttgaggggtgtttttggaggtgttagaaccgttattaggctcggactctgtagagtcttatgctcagaggactgttctgaggagaatagagccttgaatcatcgttattgatgaagtttgattttggctctgagtctgtataaacagagataaaaggttgactatttgactagtctggaccttagagcagttgacaaagttgctcatgagatgttatagatgatgtgtgtgagttgaaactgatgattatgaagtgttgattttaagcaggtatatgtttgaccatagcttggtcagagtcttggtggaggctctgtagccttgtgtaggctgagagagatcctgttgagggtcagatgatcacttgtaaagtgattggttatatgtttagagagagaatgatagtttcctttctttgaacggtttagaaccgtatttgatgtgttatatgcttgttcttgtgtaggacgtgagcgtgagagctccggtggtgtagaccacgaggccgggagagccggtgagctgtctagagcaggtaagctcttggttcttggttgtgtatcctctactgcgttccaccatatatccactgggattatggttatgatatgtgtatatgtgagtagaggaacattgcataatgctatgaatgattgttgaatgttgtagaaactctgtgaaagggtagttgatgcttgacatttgatctgaacccagagatgggtgattattgtgtatggctatgagatgttgattgatgatttgatccctgagaaagggaatggatgtgtatttgatccctgaaaaaaagggaaatggatatgtatggctatgttgattggtagcatgcttgattgattatgaaattgagtatacatgctgtgcttgattgttatcctattgtagtaggatagatgatttgagattgagaaagacctggtgagagatgtgcatgtgatatggaggtagcctcctacgtggagatgttcccatatacacataggtagcctccccaggcaattgtattgtgttagaggatgagatggccctgtgatacatagaggtagcctcgtgataagagatgtacctatgtacacagaggtagcctcaccaaaaggatatgtacctgatatatagatgaagcctcgagatagagatgtacctatatgtccagaggaagcctctgctagggatacatgcaggagatgtgcctagtatatagaggtagcctccctatgaggagatgttcctatatactaagatgtagcctctgcatgatagttattgatatgatgaatggctttatgccatgagtatgccttggttttggctgatggatgtgtatagcctgattgtggtcaggtgtattgtacatgatgattgtaattgtttttgatatatatatatatatatatatgtgtgtgtgtgtgtgtgtgtgtgtgtgtgtgtgtgtgtggtcagtgaacaaggggaaggaaataccttcaagggccctgagtttactgagattttatatctcaccccgtttgtgggacatatgatgcaggtgattcctcgagagtagcagatagatcccaaggcaagaagtctatgcaggattagctgctcatggacaccttaggctagaggacatgagcatgtggctcagatgttttgtatttcgttttggttatggattttgatgtaccctgatgggataattgtatagttttgtactgtacagaggaacttatatgtatattcaccataatatagtgtacagtgttatacagatgacatttgaggatgtcacttttagtatatgcttccaaactgcttaaactctgattgattatctacttgaatgtgttttatgctggtaatgaccctgattagtggattggggcgttacacaaaacaacttaaaaacaagtattagatgctatttaactaggttttagggaaatttataagttaagttaatgaaatcaaaagataagtgtcagtatttgaaacatgaatttttcttaaatgtggcacttatcacatacaggaaaaggtatacaacatgcacttaatgcttgtaaatgaaaagaaaagaatcacatttacttcctacaaaaccaaactgaagtaaaattgattttaatctatcaaatcactgccttggagcttgctttaaaccataaagagctttgttaagcttgcaaactaaggacttgttagctgcctcaaacccaagagtttgtttcatataaatagattcttcaagaagcccattgaggaaagcattattcacatcaagttgaaacaatgcccacccatgtgatagagcaagagtgagaatgattctaattgagactgggttaattacaggagaaaatgtctcatgaaaatcaaaaccttgaacttgatgaaaacccttagctactaacctggccttgtacttgttgatagtcccatcagcattttccttcaccctaaacacccatttgcacccaatagtctgtctatgagagggtaatgaaaccaaatcccaagtattatttttcatcaaagcatcactcaagttgcatggcagcatgccaatctgtattttctagggcccgttttatagtttttggttcaaaatgaacaagaaacaatgaagggtgtaatctacgattatgaataccagatttggaccttgtttgcataggatgagtgttactaacattggacttaggtgctggatcaagaacagaaggggttgcaaggataataatagcctctgaataaacatgtgaagtagggataaaactaaaattagtagttgattgagacaaaggagaagaagcagtaggattcttattagtcataggagaaaactaggaggtgcagaaggtacaaaatgagattgagatggagaaacctgatttagtggaggtgatgacagtctagagggtaaagatgattaagaatcaaactaaaatatgagttaagatctttgacaaagtcggtacatgaaggaaacaattcagaataagggaactttagctcattaaacaacacatccttagagatataaattctagcagaggaagacatacattttgtaacccttgtgagaattagagtaccctaaaaacaaacattattgagatctaaaatttagtttatgattatgatagggttttagaagaggaaaacatgcacaaccaaaggttttgagaaacttataatcaagaatcttataaaagagaatggtgagaggaacaacaaagttaagagaggtagtgggtagcctatttattaggtaaacaccagtagtaaaggcaaaatcccaaaattgtaaaggcaaagaagcatgatgcaataaggttagtcctaagtccactatatgtctgtgttttctctcaactaccccattttgatgatgagtatgaggaaaaataagtctatgagagatatcaaagaaggttaaaagagtggaaaaaggtttgtattctcatccccgatcagactgaacgcttttgattttagtgttaagttgcaactcaacaagagatttaaaggcttggaaaatagaaacagtttcagctttgatctttatgggaaatatccaagtgtatctggagaaagcatcaatgaaggatacataatacttaaatccagcataagaggttatgttagagggtccccatcaatctatgacaacaagttctaaaggagaataaatagaagtagaattagatgaaggtaacctatgagattttcccatacagcaagaagaacagaaatctgaaacaattttatttgattgggaaatattacgataattgagaacaagtttgactagttggttgtttggatgccttaacctagcatgccaaagactggcagaattaggtaaagaaacatcagaattagaagaagcattagaactagtattgaaaacaacagaaactttggacaaattgtttgctgaagatgaaactgaagtagacaacagatgtgtagatgagtgctagagcttgagattttgaaaatagtacataccatcaactccaacagaaccttggagtagaactttatttgtctcctgagatttcataagacaaatatgagggtgaaattcaaagaaaacaaaatatctctagcaaattgacttacacttaaaaaaaattcaagatagagggaacatgtaataatttgtgtagtttaaaagtgaaatgggtatcattaagggacataaaaaaggaagaactgcacaattgatacttaaaccttcaccattgccaatgaatatttgatcaggaccatcaaaatggttgaattacttgatgtgttgtgactcaccagtcacatgaaaattgactctagaatctggaatccaagtgaagctagctggatcaccaccaggagagtgggaattagtgagcaagttattaggatgactaccagactgagcaagaggtatggaattaggattagtccaagtattggatgatctagtcgagcccatggtgtggggaataggttgaaaattggtaggatcaaagaaagcaacagatttatgaggcttaaaactcatgtctgaatgcagaagacacacatttgcaatgtggccatatttcagacagatttgatattggaaattggcaaatctgccacctccacgatctctaccaagtcccccactactgtgaccaactcattggtcaaaaaaaccactacgaccaccaccattctggccataggaacctctataattcgagtaaccttgagtgtagtttagagagggagaacttaatacctgaacctctttgttataatggttgagacgagtctcacgaccataaaaaagttcctctattttagcaatcaaaggagttcatttcttaccttcaataactgatataaccgacgcataatttgcgggaacaccttcaagtagagcatcaacatactcttcatgtctaactggtactccaactccgacaagttcatcaacataccctttgatcttttgcaattaatcatcaatagaaaaatgcacgcattgcagtgcgtagttgacgagcacgagacttggtgtgaagactgaaattttcatggatttttctcccaaacttggtaagaatgatctgaaccaagaacacatgacataacatattttgaaagagttaattgaagccaaacaggaagtgtttgatcctgaacttcccaagcttcatactcaggattaaatgtatcagccatttgagctttttccgtgagataccgaggtggaattaaaggattcacaacaaaacactacaacttgtgtgacttaattactggttcaacatgttgacaccagtgaaggtagttagaatcatctaattcttagctatggagtttggaaatgattgagaaaccacattcatagaagtggaagccatgaattaactgacaacgagtttgtagaagaacggatgaacaatcggaacatagcaacaagccaaacacccaccaaaatttgaaccaaacacaaattaggaacttgaatcgaacagaagcaccggaaatcaaccacgaaagatgatttcaagatgaaatagaacttcaaacaacaacaacaatcgcgaaatggagatcgcaaacccaaatagaaacaatatcccgaacaggaatacgatttcttgaaggaaagaacaacaaaaacccaaacgtaacttttgaatagatgaacaaggactagatcgcggacaggtatgtgatttgtgaataaagagactgatgcactatcattgcaaaaaaaaaaaaaacagctctagaaccattttagaagtttaagatggataaggtaggagagaaaacaaagtgaatatgaactaaaatattatttctgaggaaatgaaaagctaatctcagttagttacaagagaggtatataaacctcttgaacataaataactagctaacagaaaactaataattgtctaactacctaagtgttgtcagcaaaagctaacagacttactgactacctaggtgctcttagcaaaagctaacagactttaacacagaaatacaaaactatttttacagttttaaatgcatattctaatagtgacaaagtacataatggaaccattcatctcatgcccattgcttctaaggatcagttggctgatttacatactaaagccctctcttttcctattttttctttcctgttatccaagctgaacatgattgatattcacggtccagcttgagggaggatgttaatacatttcattcattgtaacttgttgttaataggttttaatacagttgttagttttaagtacagttattagcatagttgtcattttctgacttatatatatatatatatatatatatatatatatatatatattcttatcccattgatgaatacattagagaaattcattttaccagttcattttgttaacactcatgtcttctcaaagctctagcacgagggcaaaagaaccaaaagggtgtttttttaaaaaatatttaccgataaggtgcgttttcaaaaatatttgcaaatctggtgcaagaggggacctatatttacaaatctagtgcagtgtaacatgcctgaattaggcatgttacaacacgcctagattgggcgtgttgtaacatgcctaattcaggcatgttacagctgcatcagatttgcaaatagcccccccccccccccgatccccagttggttcatatattggcttccaatgttctttgactctggtaaactgccatcattctggtatttttttgttttttaagagatttttgaaggttttttaagtgacgagaagcatgcgttcgagtcgtgattctattcgtgtttgagggattagggtttgctgggcatggttaggttgtgtttagggtacgctcatgtgacgatagtttgtggttaagggtttagggtttgctgggcatgggacgtgacgtttgggccagggttggggtaggataaggtttcatggttatgtgacgatggtttgcggttaatggtttagggtttggtgggcatgttatgtgacatttgggctagggttggggtagggttggtttcatgattttggtttcaacttggcaaaatgcttcaccttcttcattagctcatgctcatagtcctcagagtaaccctttaatccccgcaaactgctttctcacctagaaaagattccactattccctctaataggaacatacagtcccttgtggccatggctcatgcggaatgaactcacgatatggcaaggactactatgcctgcctcatcaacctaaccaacatcaacagtaaatcattaaccattaacctgaactccccaaaccctaaaagcatgaacctcgacgtacattgtttcaacttgtgccaagtccatcattatatacacagataagaagcaaaacacaacaagaaaaaatcatgagaccctgttatcgaggaattagggacttgactgacctggggagtcgaataaagtcacaggttaaaatgagtttttcattagttgtttccacttatggcaggtccattatcatatacacagcaccaatcacactcttcactcttcagtctgcattaagaagaagcaaaacacaacaagaaagaaaatgtctgatcatgtctttctcccattcaccttcttcatcagctcatgctcatagtcctcagagttggaaaaacctaaatctaagctcaagcctccagtcctccactagtccgctcagtcgctctgctcaccactggtccactcaatcgctcaccactagtccatgacgatgctcagtgaggacgttggtcttagtgctgtccttccaaatcccccaaaaccaaacctttctcacctagaaaagattccactattccctccaacaggaacatacagtgcccttgtggccatgactcttgcgaaatcaaatcacgctatggcaaggactactatgcctgccccatcaacctaaccaacataaacagtaaatcattaaccataaacccttacaccatgtaccaatgtccaccaaaaccataaaccctaaaccataccccctacaatcctggaccgccaatcctaaaccctataccctaaatccaaaccatttaacacaaaccctagccatgtaaaccaacatacacctaacccataaacccacacaccttaaacaccaaaccattaatctcaaccccccaaaccctaaaatcatgaacctcgacgtacattgtttccagtagtgccaagtccatcatcatatacacagagaagaagcaaaacacaataagaaagaaaatgtctgatcatgtctttctctcattcaccttcttcatcagctcatgctcatagtcctcagagtaacccttcaatccccgcaaacaaatgcaacaaataacttgttacaactttaaaggttcatacaatcataacttagcatgataaactaataagcggacactgtatgtttactgtactacaactacgaaggcactattactggttacagggagatgtagcatgtgataaaagaaggaaagtacacaagcagagcgtgtctttacagatgcagttttttatgtgcctagacaatagacatgtttagggtttagggtttggctaaggtttagggattggttggggtttaggggttgggtattcgggtgaggggttagggttgtgtcggcaggcgtacatggtgtttggggtttagggctttgtgttgagtttagggtttggttggggtttagggtttggttgggatgtagggtttggtttagggtttagggtttggctagggtttatggttgtgtcggcatgcgtacatggtgtttagggttagggtatagggtttaggattggcggtccaggattgtagggggtatggtttagggtttatgaggcaaagtgtatatctgttcgtgttctactattttttgtctttacacgcttggcgatttgtttttgctggtgagtggttcccataagctttctaacacaccatgtatctcagcttccttccatcattcaaaatctcaaagtttgttctttttgatcagtgattcactggccactagatccagggattccgcctacaatcacgaaagaaaaagccactgcaaaggataaactattggcaaaagaaccaaaagggtgtttttttttaaaatatttaccgataaggtgcgttttcaaaaatatttgcaaatctggtgcaggaggatacctatatttacaaatctggttttcacaactaccgggtcattttaacccgtgactttattcgactccccatgtcagtcaagtccccaattccttgataacagggtcagcgtgaaaatcggtagttgtgaaaaccggggcggtcattgacccggtagaggtagtgggtcactgggtcagtggtccaaccggtgggtcattaattggaccaaataaccctataccctaatatatattcttcttttctccaagcttcgggatttttcttttctccaaccttttgcagcgccgtttgcttttttttctccttctctagagcaacataattgttcaataggcttgatagaagactgatgaaggtagctgaacaacaaataacaacatattaaggcacattgttgctccaaatccaaaaaaaacttgatcttttagcatatgccaactgcaaggaaggtcttcccctttggtgccactatttggagaagcaacgaggaagaaccttttgaggtgcctttctccattacacttgacccccaacagcttctctgttcgatgtacgtgattaatgtagttcttccttgagacagaatcaagatttaaagaaacttttaaccaaccagatatattaaggctcatcttcgcagactcttcaaacatgagcttcaagctctaaagcaaaacattgaactcactaatctggatgggtcttgggtttagggtttagggtttggttggagtttagggtttggctagggtcttgggtttagggtttatggtttagggtttggttggggtttaggggttgggtattcaggtgaggggttagggttgtgtcggcagacgtacatggtgtttggggtttaggacgtcattcaacacgcccaccaaccctaaactatgcaaccagaatcatgaaacctaagcctgacccaaccctagcccaaatgtcacgtaccatgcccaccaaaccctaaacccttaaccgcaaaccattgtcacataccatccctcaaacacgaacagaatcagcacttgaactcaggcttctcgtcactcaaaacaacttcaaaaatctctgaaaaaaatgaaaatacactcgaatggtaggcatggtaggcagtttagcagagacagaacactggaagccaagatatgaaggacctgcaaagcgggggggccttatctaccaaatctggtgctgctgcaacatatttttgaaaacacaccttatcggtaaatatttttaaaaaaaaacacccttttggttcttttgccctagcacgagtgagtaaaatatccttcttcctctttcccccatttacttcctcttgcacatggtggttagtttcccttgacccctaacacctttaacatattttggaagattaataaataatatcctgttaccaatcaagatcttgtctagttgcgagtctaggaggatatggttttgcaccccttggataatcacagaaccatccattgttgtttctctacttacaaataaaaagatctatgaccctgccccatctcaggaacacctgccacatattttcctcaatgaagacacctaaaaaatttgtgaagtagaacggtgtacgatcactcctagtcccccgagatattggcccactgaagcatttcccataacccctcactgatgctctttcctgacctctcatatcctaagtattgtgcaaagttaccatttgttgacaatttatcatattatttatttcactattacaataattattctatattttaataattataaaaaaaccaaatatgaaataattacataattatataattaacaattacacaaatatataataatagaattatatataaatgtataattatattattaataattataaaattaaacataacaatacaaggacatgaagtaacatatttataccctaatccggcctcattttcttaagttgggaaaaattcaaacctgaaccctaccccagccaaagtgaaatcaaaatcgggacatgatgggatgagtacctacagatttaatttttatttccaccaaactttgatacttattgtgttttatactatattcctaaacgatggacctttggtaaaaatataaataaataaaagataaatagtcatttttgtccttaaatgtgtagagtgttcacaagttcatcccgaaagatgaaaattcaaattttagtctcaaaaagtgaaaaagcagcaaattcatccaatagttaacttccgttcattaccattaatgaaagaggttacatgacatattaagagacgaatttgtcagcgttctacacattcaaggacgaaaatgactatttacctaaaatataatttaatcttcatcttccccctttttaatcattgcaatcataacagtaaaataagcacttaaaaaaataggaaaacaaacataagttagaacaaatataataataagcataatgattattaataagcataatttgtttaatactctgaaatttctaatatgacagtagcttacctgaaatatgagattcaaaccaaaaaaacacaactattaagttaatccttacaaaacaataagcttcaacttgattttatcactacctaatattgtcacaatagaaatttcaaagtaacaaacatatcactactacaaaactcgatttttaagacggttaaaataggcctttaaagacggttccagaaccgtcctagtatcgcgcgacgtagaaagtcgaacctactaagacggtccgacaaccgtcttagaaggtacttttagaaagaaaaaaaattaacagattctaagacggttatctgctgcaaccgtcttagtatatgtgctttctaagacggttacaatgaataaccgtcttagaatctgtgttatttttttatttaaagcgctttctaagacggtttcttctgcaaccgttttagtatgtttcgaaattctaagacggtcactgtttaaccgtcttagaatatgtagtaaattttttttttagaatttctttctaagacagtcgatgactacgaccgtcttagtaggtgtacattctaagacggttaattacacaaccgtctttgtttgttttttttattccttttttcatattttttacttcttattttttcaattcgaatatgctttatttttaaacaaggaaaacaaagatagaaaactattgaaccaattgccatcattttacataatctatattttaatgaattagtatataaatagctgaaaaataatggaccatccaatgtaagtgtttccattacatagaaaaagtactaggttccaatgacaattaaattattggtcattttctatatgtaatggcccagcaatccatgaagaatcagcaacaacatgatgacaagtgtaagtcatggcttgtgatgggtgaagcaattaacttaagtaactagaggagttggaaacctgtatttatgaatggaacagattggcctagccccatctgcgaatgtactgaacattgagggacagatcaggaaaattttggttgcgacttccatgatacaagaatcagaacagcttcaacttctaatgaatccatctgattcagaactttataaagctaaagattagagtgactgacccttatacaatatatcatttactaaaatgagtgttgatagtccatcatcacatgattttttttcaatctctattatcaaaagggtacttttttatgttttcccctactcaacaaataagtggccaaaaaaacttatgattatcgttctgtatcatggcatgcaaattagcctttcaataagaaggttctggattgatcttcttgacatgtagagtttataaccatttttagaaactaggccaatgatggtatttgtcaccttatagtctttctctagcccaagatcaaccatatataagttaaaaatatataaaattgtggatgttcttgacttaacacacataaaagccaaacaaatgaaaatgccagctaggctcaacccacatgctaatccagaagggtgtaaaactacaaagtgttcctgttttgatgaggctttacaaaacttacaagctaaagataattatccctatgctaaaagttgttcttaattaggtttgcttgattccaatggcctaaggtatgtaacattaaaagacaaagcaaaatatcaagggagatatttgatacataatatacaacaatggtgcattttgttcgtatttgatgtggtgatgtaatccatgaaagtgatagaaactatttttgacataagaacaatggaagaataataaaatattattatttatttccatatcaaattaatggcttcctcttttatttgaccacttgcatgttacataattttcaaactacttataatggatgttgcatataatgatatgcttatttgtttcctacatggccatgaccatgctccaagtttattcctcttaggaaatcaatagaacacaatgcttaagctacaacttatgttgttgttatggaaaacatgttcacgtgtatatttacatatttttaatgcatctataactaaaatcaagcaaattaatgttagtcataaacccatgaatcaattaagtaaaagggaggagggtcctcaacaacaacctattgaataataatcttttgttagagtaaaacagaaaataaaacaacagtaattgtatgaacacaagtggccaagcaggagtgttggaattttgttaagcacaaagtatagatgcaagatgaccaccaagcaacacgaaaacccaagagctttttcatatgtaagcgaactgttctaagcaagatatattgtgttatgtataattgtcaaagaaaaccagtgaatgatgtatcgatttaacgcatctaaaatccctactttaacttaatttgctatcacattccaaagaatatgtctcttctttgaattctactattggacttggttttcttgtggaagttgtaggtattggtaaggggaaggaagaccttaccaaccctgaggtagaaaagggatggtgaacccgataaccattaccattgttacctaaaactgaagagggcccttggggcaaaaactttcagagaaggaggccttgctagtccaggccattgaagaaaggaaaatgcaaagaagatggctgaaagagttgaaaagaattgaccaccctcaagaagaccttcaactccaaactccatcagctcaaaataggctggaagaagtggtagagagactgaataccacattaatgcacaaaaatgttatcattgtgagcaatgatacacgtaccgctcaatcttctaaaaccagagacataactagtggcaatcttaacaacaacttgacatatatggaaatgctcatacaaccttatccatcaatgagaatgcatgatacactcgaacaaaaaaaggaagcgaatattatataaatagaggtgccagactatgtgaaggtacattttcaaggaaacgaaaatggtcacggtctagaacaaggatcatacctcaataatctcttatggatgacggcacacatgtcgaagtctaagaccttaacaatatggttccactggtcagaggcagagccgtgtttatcactcacgcagtgcagcttcaccaaggaattgcgtggaagctagagattacaaggtgagcggggattgaaacagagaggctctcatcgatatgaacggtggtgacgttggacaaaggcgcggcgttgaggcggattgcggcgcgtgtgaggcgatcgaggcggagccaccgactgcatacgaaggagttggcggaggagcttagggcacgagagagtagggcacgagaaaggaaaggcaaaaaatgagagttagcttgtcaatttcgtggggacctttttggagtcgagggcaaaacggccgtgtttcaaaaaaaatttctaacatttttaagacggttaatcctaacccgtctttgaaagcactaaaacgaagccatttaagacggttttgtcgtgaactgtctttgaaatgttcttcttaatttcaaaaataccaccatcccaccttttaaaatggtttattggcaaccgacttaaattggccgccttaaaatgtaatttttgtagtagtgtattatgcttattattatatttgttttaacttatgcttgctctcatattttttttaagtgtttattgtaatgttatgcttacagcgattaaaaaatggggaaaaatgaaggttaaattatattttgggtaaatagttattttcgtgattgaatatgtagaacactgacaaattcgtccctaaatgagtcatgtaaactctttcactaacaataatggacaaaagttaacggatgaatggagttatcacacttttttcactttcaaggagtaaaatttgaatttttatcttttgaagattaatttgtcaactctctacacatttaaaaaaaatgattatttactcataataaataaaccatggagctaacattaattattaggggaatttatacaataaaagttgccacattatcctgtaaaagtgtttcggaaatggaaggggtaatgaaacccaactaacgtgtttattacacaaacttccttttaagccttttgttttctaacgttttatttgagccactaatgtctttgtagagagattcggttattaattaatgtgtgtgtatatatatatatatatatatatatatatatatatatatatatatatatatatatgtttaatacttttttaattcttgaaaggatttgtttaatgctaaaagtgtgtagaatgagcagaaatgagtttttaagtgagtaaagagccactaatgtttgtagagaatttaactaatgtatatgtttaattaatgagttcttcaagtgactaaacttatatatatatatatatatatatatatatatatatataattcattttagttaaatctaataattttaattacatattaaaattattaaatttcaagaaaataaacggtaaaatataaaataactctttgatttcttctctaattttaattttaaaattttatctatatcatcattaattaatttatagattttgttgtccgtcacaaatttatctatatattgtataaaggaaaaatttgtataattggaaaactatcatgcgacactctctaactcattctcgaattaaatgtaattaaataaattttaattaataaataatatcaaattaaaaataataaagtagatttaatcattgatttaataatttcattctttcatttttaaattgatttaatttttccgttaaatctttaatttttatttttcactataataataaacaatcaaataataaataaaaagctcaactaaataccgatatataaaataataagcatgatatgatatatgatgccgtataattttaatatttgatttttcgagaatcaacggttcatactttatcaattatagataaagagtataacttttaattaaaagttatagataaaaattaaaattacagccgtagtatatgtatatatatatgtatatatgtatatatatatatgtatatatatatgtatatatatatatacatacattattttaaattattaacatttctaaattttattttatatatttgtattttatgaaaaaaggattaaaatttaacataattttaaccattaaattttaattaaaaatataatattttaattttacacataaataatatgaaataacaattaaagatgatatattaactaggatagttataatattaatgacaaaattttaaaataaaataattgtttatattttattgattagtctaaaatagattgtttaatcccatttttttacttgagatcaattagccaaagcataaaagagagaaataaatttcaaaataacctttggtaaaaaggaaggagaaagtattattttagattaggaaaaaaaaactacttacttttagaaaccacactcgtcttcttgcagcaccgaaaacgtacgtgttagaaacaaacactataaatctcccgccccacgaaagagagtgaccgtggacactctctctctcttccgtcctcataaaaaaaatggcgaacgatattcgattcttcgaactcaacacgggcgccaagatcccttcagtcggcttgagaacttggcagtccgatcctggccttgttgctgaagccgttgctgcggccatcaaggtttccattttatgagtattttacgctttctcattgccattttttgaattcttttattttaatttgataggctttcttcaagttgtttgatgtctgttgttgttaatcattacaatttctaatcctttttcctccttattattttgtcatcacaaaatgtgttatttttttttcttggagtaagattggttctatgtagtggcggacccaggttggtgtcaatgtgcggacataaaacttcagcggattatggcgcatacaactcacagctcacagactcaccacaacatgacacttccctcttacgagtgatttatttacataataaattgaattgaatctgcaaagtaaaatgttaatatgtacactatacaaattattacttttaatcaatttacataatactatctctttaacctttgtgcaaaattaattaatactcaaataaaaaatttcataaattgttttctttaatttcacatacaagattcatatattatctatttctgatataaacatctatcctagctttaacatccaaacattataacacttaaaaatattagcaatttattcggtaaaaaaaaccactattaatttttagagtaaactatattcaatctttttaaggtttggtcaaatctttttttatttctcttttatttatatattactatcccaatagtaactcataattatttgaaattatattgaaactttttaaggattggtaaaatttggaggactaaatgattggtcaaactataatttgtatcttgttacaaaaataactacattttgagcgggttcataaccttatacataaagcattgatttaaatttctttaaaaaaaaagattttctagatccgcaagtggttctatgtgcatgatatttacattgattatatacattaccgatataaaaatgtcatatttatattaattatatgtataattaatataaaaagtcatcaatatatatatatatatatatattgatgatacggataaatgtggtcacacacacaacccccatatatgaaggaattgtataatataaatgaaaatgagaactataaatataaattgcttgatttttaaagcaatcatggtcatgtgatcagttgccaatttaaagtatatttaaaagggtttttgagctcaagaacctttgtcccaccagatttatcattaattttttgcttaagagttcttcaagttggaggttgaattttaggagaagagttttcaataactttttttcttcaaaaaacttattttctaatgccatttgagagaaaaagagagattccttttttttttttttgcaagtaaaatccaagaacccaaattggattctaccactagaaccaaaaaataatctaagaatataaaattggttcttccactaaagatactcttataatcttgaccattcttatattttcaattataataaagttctcttaagaaagaaatttagagttctcatttaccaaaaaaatttagtgttttcagaataggctccacacacaaacgcattttgtttctatatataagatttttttaaccaattcataaaatttaagaaaattaattaatttaatgaatcacattaactttggcaataatttgtattgtttttctaaaattatcctccatatttctttcaaattattttttttctcacctaattagttaatgtttggatgaagaatattgtaattaattaagggtattaaaggaaaataattaatgtactagacaattaaaagatgatgttataaaaaggaaaaaacaatagtgtgaagggtcttagatttccagagattaacagttttatgtttcttgtgcttagttttctagttttataattttattccttttaactttttgtcttgatttctttagttcttgattgtcctcttgcatttgtacctttccattctatcttaatgaattctttatttatctaaaaaagattattattttctgatttgcagttgtaacaaccaacatttcagttttccacttttcctcttgtacatgcatatataagctatatatcagctaaattagaataattttcacttactcaatttggaaatctgttattcaataaaatgatccttgatttgatcaatttgatgcaggttggttaccgccacattgattgtgctaaaatctatggcaacgagaaggaggtaattgccacaactacatgtttgttcttattgcgtttgtgtggtggtgttatctcgattcaacagtataactatttatttggagtaaatgattggaattagtattcgtcatattatgtatgaaggaattgattcattctttctgttgcagattggctctatgttgaagaagctgtttgaggagggtgtagtgaagcgtgaggatttgtgggttacatctaaactatggtttgttttagattctagattaatttgttttgtttccattcttaagctaaattaatagttcggctagattcatgcttatgaatgcttagaactcaaggatttaagatgatctgtaggaatgctgatcatgctccagaagatttacagctagcattggacaggaccttgagagatttgcagcttgattatgtagatttgtatcttgtatgtaactgtttggcgttagaattattttatgcaaaattgatgattttattaccccgaatttctctctgggttgaacatgatgattattttgtcttgatttaatttcaaaatttagtgtgaaaatgtaatctgaaatatggatttccgggggaacagccttttgatgatgttttgttatcatgaaaatatgatgttaattggaccgggaacttttatggtaatagtcttggttagtagtaaaatgcataatggtttttgagaagactatatgcataatgtttttcttttttaaattattcatacagtataatagggaactattttttaaaccatgtgtctcagacttttccaccgaatgtcttttttctagagagtctgatataataaagaaaaggcttctactaacagaaaagaatacaaaagaatgaatgattctcaagactttcaagtggcttgaactctccaacaaccatttgaatttcctctcaaatcacaagcacttgtttactactaagacttatcttatgagtgacaatcacttgcttgtttaaatatatggcagggcttatgtaaatagtttataagatatttataagttgctttaattctgcttttgttcctgaattttttttaattctgtttttagtctttttaaccttttttttttcttccttaagacagaaaaaaataaaaaactaaaaaagcaattataaaaaacagataaaaaaagtttatgtactaaaaacaaaacttctaaaaagtttaagtagactataaaccctacatatttaatagtttatttatgagattcccatttgtaaactgaagaattagtaaaggtttaacttagttgattaagtagtgagtgttgtaaatctctagtagtttgttgaatttctataaataaaaaaataaaaaaactgaagaatctgcctttttcagatccactggcctactccaatgaagaaaggatcaattgacattatcccagaaaatcttgtgcaatattcaaacatacctgacacatggaaggcaatggaagcactctacgactccggcaaggctagggctatcggtgtaagcaacttttctaccaagaagctgacacagttgctggaaattgctcgtgttcctcctgctgtcaaccaggtggagtgtcatccttcatggcagcaaaacaagctgcaggctttctgcaaatccaaaggtgtccacctctctgtaagtttacaactctaaactcttgaataatcttgaataaaaggtaaaatattttgtgtctgtacattgtagtggctattttcctaaaaaaatttgttttttatcacgaaatattattggctaaattataattttaatctcctataattcttaaattataattcttattttataaatttgcaatttttatcaatctttagtttttgcatacattttctttatattttaattaattaaatatatttttatgatattttaagtaaagatgttatgtttaagttcaattagattaagaaaaaaatgttaaattaaattaaaacaaaattacaaattttttaaaataaagaccaaaaaaattacaagaaaaaaacaggaaaactaaagttgctaattaaaagttttaatgggatgaaaattacaatttaatattatttttttatatatctaaatttttctaatttcatatgagatatttttgatgggtatgtttagggatattcacctttgggctcccctggaacaacctggcttaaaggtgatgtccttaagcatccagttacaaatatggttgcggagaaattgggaaagactcctgcacaagtagctcttcgttgggggcttcaaatgggccatagtgtgcttcccaagagtacaaacgaagcaaggataaaggaaaattttgatgtttttggctggtctataccagaggagttgctcactaaattttctgagattcaacaggtaagcatttcatttgatagttaaccaaagtctttcgagtaatttacaatctgaatatataatttgtattgtgttctacctttaaactgatgagaaagctctttgccatgtaatgtaatcaaatacatacaagagtttatttctgattcgtttttcaaacacttatttgtccaagtcctactcccttttgttcctaattatatttttaataactgttattacttaattattatctctttaaatattaatgaaaaataattaagtagataaaaataaaaatttaaaataatagtataaataattaacatatttaatatgattgattaaattaatttttttaagaggcaaaaattagttgaaaaatcatataattaaagagggatggaatatattttggagatgaacagtggaattcgttgagagtatgatattgtggtatgaaatttacttttaacatttctatgagtgtggtggttgttgcaggcaagaatactcaggggtgacttctttgtccatgaaacttatggtgcctacaaatcggttgaggaactttgggatggtgaaatctgagcaatctgctttgtaaatttcacaagtgaatggacgtaccgtggtgtaggagttatgggaaactgtgaaccagtgtactccttctacccatgcgattatttatgttgggtgtaaatactaataagagtaaatattttatacactgtataaataatttttacaatattatttgataataaattattatatatgataactattataaaaatcatttttaaaagttataataattaccataatgtatataaattaaactcttataacaattgtttaaattatattttatagttaatctttgcacatgtgtgatgcacaacaaatctaaatggtggtatgtagcttttgttaatttttatactcatttatccaaaaaaaaaaaaaattgttaaactcatgtctttagttataatattttttcaattaatttaggtttcttaataaaaatgattaatttaattaattacattaaatatattaattatttatactaatatttcaaaattacttttgtttatttatatatccacttaattattttttattaatttttacaaagagaataactaagagagggtatttagaagaaaaaataattaatgaatctaaaaattagaaaatagtcttatgaaaagagacaaataaatttttgtaagaagtcttataattaagaatgaagagaataatttgttactaaattataacattgtgattttttaattttatgattaagttatcttaattaaattgtaagaatgattaaatttatcttatgcagttaaaaaatataaataaagtggatgatgtactatgttgtctctaagaggtgaattaagttgtgtgaagtgggcttagagagaggaaatccattcctccattctttatttatgacatgcttaaagaggtctttagtcctttaaatttgaatgattgttttttatttattcaaaaaaattctgtttttattaatccctcaaatatttgaaaatttacttttagtccatctcattttatgtcaatggtctcataacttgtggcggttctgtaccattagaatgttttttttttaatttaattttttaaaatgataagtgacagtttaaaatcaaaatcattccacattcatgtttttatttttctcatttaaaatcgccaaataatgtaaaaaaaaatagtcaccaaaccatataagtaaaattttggaggtgtttatggtacaagaagtttcaaatttgtttaatgctttggttgtgtcagttatgtttaagttaaactgtcgtatttatccaaaaagtctctattttttttgaaaatgcattctatacgtagtcaatccgtccccacgagaattgagaatcttcgtcccacaaatcaacattcattccaccatgtaaatcacgcacacatgcgaatttcataaagtgtatgaggttcacatcccctaaggtctcagtctcacaaaacaagtgttggccaaacatacctaagtagtttattaagactagacatctatgggataaacttcatacaccattttaaattccaatacaccattagttgaatagtgtacattcgaaactacccttttaatttttaaaaaacgtaaacagctcctgcatctcttcgcctcctccacccttgctttcccacaccgttatcgagctcccaactgcgtcgtgctggttgatacccccgtcatcggaatcggtctcctccctggtgatatcttcttctccatttgtcgcgggtgcattccgaggtgggtgatttctgcttctggtctgaaatgggggtggggtcgcatacggattttcgaatccgtaagagttatacggattgagggatccgtataagtcatacgaattatacaatccataagactcatacggattgactgatccgtataagtcttacggattgtgtaatccgtatgacttatacggatcagtcaatttgtataaggcatacggattacacaatccgtaagacttatatggatcagtcaatccgtatgagtcttacggattgtataatccgtatgactcatacttttgtgtttttaaatttagaaaatataaatggaattcaatattaaatctgggattgcatatatgaggttaatagagtgtatatgaaatgggatgcttatttgtgatggtagtcaagctgatatgaaattagtgtgaccatgcaagagctactagtgaggaacttgtgcatttttaattgattaaggcctgatgtcaactaagccaaatcgaggctgttaaaaatgagcaagttttgatgaagtccaagataaaacttgaatgaattggaattgctaacataacacaccatggagaataacattattgcttcatagttgtacccttagagataatatagtcaaatgaagaatgattgaaagttgtacaacaactttccaaatataaatcatttcatttacttatttgtacataagttgtgtttctatcaaaaactttgaagatcatatgaacaaagcatgaaaaagaacattactgtgaagattaaactagcaaggcagccatggcacttgttgagagtcttgttatttgaatgtgtacatgcttgtgacattgggcaatgtttgtggtgaacaattttgattttaagcatttgaaacgaataattccatgtgttgtgttttgggtgcattgtcaaactgatttgttaattacatttgttgttgtaacttcacttgtgctgtgaatgtagattatggctaggacgagaggtcggccaattggacgtagtcctgatagaggtacacatggtagaggtcaggatgcagaaggcgctgagcgtcgtaggcctaccgcatctgcccgctgtcttagggcaggtgttgatgtgcctcaggaggaggatcctcccatgcaagaaccatagggtgagactgttgaaccagtcattgaggatatggagattgagaccgaatcttttccaggtggaccggaagattcttcggtgctgaccgggttcgccgatcacatagctctgagagtatgggcaggacaggtattgacatgttgaagtacatagtctaaggtttattggacttttgttattgttaatgtcttacctttaatgatggacatcaatgcaggaacgtccagagttaaagctcgcttcccatgggcgaaaggttattaaatttgggaagtctgtgcctgagataaaaggttttgtggctgtcactggcctaactcctttgattggatgctcagttgacacaggggatagggggttgctctctgcattcgttgagagatggcaccccgagacatgtagctttcatctgtcggtgggggagatgacattgaccttggacgacgtgtcatcactactgcatatccctgttatgggtacttttttttattatgatcagatggacgtcggcgaggccatcaccttactagtggatctgctcgatgtgactgtcaaggaaactgcagctgagacgtcccagtgccacggagcatacgtcagactatcatggcttcgagagctttatgatgtgaagtgtcagacaatgcagtggatattagctgccagggcctacttacttcaccttgttggctgcacactgtttgccaacacacatataggtgtggttttcttggaggctttccgagactttgatcggtcagcaggatttgcatggggtgcgggtgctcttatccacgtctatgataatttgagctacgcatgtaaacaccacgggaaacatcttgcaggctacatttctcttttacaggtaatgaaacaatttcatgtgtctagttgttaaccgtgattgtatgcctatgctgttttgtgttatttgctaactttattcgttttaaatttgtagtgctggatatacgagcattttcctagtataggaaatgttgttccagacgagcactatgacgagaggcagcctcgtgcctgtcggtggacgaccgtgaaggccttaccggtggcaacctatcgaaaacgtatagatagattgacaccgactgatatcagttggacaccttatgggaagcatcgtgcccacagggagtttgaggccattactttgttttctggtttcctaagatggggtccgcacatcacaacatatttacctgagagggtggttagacagtttgggtatgtgcaacatattccacccctgcctgtgtctgatgttccttctgttgaagacattgaagacaggtgggtcaacttcgcagagcacgttgtcccaaccggagagttggttgattatccagggcattgtggagctgcatacatgggtggttcttccgcatctcccacccattcatgactccgtctcgatatgaggaggttcatgcccagatgcctccagcaccgcagattccatctacctagacacatgatgcttcagttgatgcccccaggcagtccgagtcacaaacagaggaggacgtgcagaggccagttcatgcagtggtaagacaaatgcatttcatttatttaacgtgtatattcattgtggatttattcttaatgctttgcttgactaaaatgattttttttgtagaacgtgtgtcaacgtgttgctgagggcttgcaacacatgcttgacatgcgtatggtcacagaaggcacagatgcatactccatgacggagcaattgctgcagccagttcgtggtgtcagtgctgatggaaacatgtacatccgagctagacccgttattaggccaaggaggaggcctgtcggtgaccgcagttgacacattttcttttactttcatgtattcgacaggcattgacatatattttgtttgacttttatgtattggacatcgattgagaaaccttgttatatgacatttatgtattgaacagcttattgtcattacgatcttctttacttacttagaacaacaaacgacgaaagatgttttttatcattgaacaaaatttaatcactaaagacatacatttccattgttaattaaatgtctatacatctcccaaattaacatattctatgggcaaactcatcgatttggcatacatttgcattcgatcaaggtaatggtagggccactacttagcttccgtgatacagtgactatcccacaaacatgccattaggggtaaaacctgttttgaacaatttcaaacacaaatcatgaattccataaaattaacctcatgcatgcaaattaaatagtttatgtgttaccttaacaaaatgatttccaaacacatgaccaatacacaaaattcgatgaactcgtggatctctaggaggttggcctcttaaaggaaagaacgtcaaattttgctgcagtgacagggatactacaatgatgttatatcttgatgcaatcacatgacccatgtctgtaatgtccatccacttatccatcgttacctgcaaattatcaattactcaaatatgaaaaagcacttttggtttaaaaataatggcaagtgatgtcgaataaaaaggaagtttcacctttgacaatccatcaactagtaccgctttaacatttcaaacctatgtatcccaccaaacaaagctatatattgatcggtccattgtgcaagttccttgagcagatgattgcgtacaaatgaccaagcctcctcaccataacctaataaggcaacaatgactcgatatccacaattaccatcagtttttacatcagttatgtctacaatatatttatgcataaatggatgaaattgatcgagcataggaaccatccgggttttcctcataacatcagacgaggaagtacactatgtcggagtagaacaactgttttgcacagaatgtaagtcatcgacatactcaaagtaagatgagtcccttcttgtggaacgttcgtgcttagacatctttttcttctgagcacctttagttttgaccttatcaggtggatggcacatggaattcaaatcagggtatgcaatttctttaagcttagacttcagtgtcatttttccacacaaatccagcttttcaaagctattagatatggcttccatctcatctgttatgctaacttggttttcatctgcaccattatccaaaaagtttaatctccgacaaaacatatgaacggtgttaattggaatgcttccaataacatacttagatagcacacatgcacaaggcaaaccatatgatgttctcagcacatatacacaacgagatgggttttttccagcataattcacccgctcatactcagcagcaatttgatttaacgcatacctggacaccataccaataagtctcttgtataacattactttaaagcatgtccaaccacatgtgtacttttttccaaagatgccttgatttctgtatgttgcaagatgatcatattgttcatcgcgtcccaaaccgtgcacaaatcaccaagactattctgtagtaggcactttaagctccaatgggcagactcaaccctgcaatttacgatgaacatcaataaatttcaaagactaaaaatgtatgcaaatgataatttaaccaatgtttgttgtggatgtgtgctgagaacctacacagtaatttaaccaaacttacctgtttgttgttgtatttccaaaatgcatgactttatttgtccatgcggtcacaaatttttctttgtggggattcaaccaagtgcccttcacgtaatcaatgaacgtcggccacggagcacatgcaacctcaaacttcataacataatcatcaaattcattctccttagcacagtcgacaacacttccctgtgcttccatcacataatctcatgcattctgctgccgaatataatttttgcatttaaccttcacattcttgtcaatgtgaaacctacacagtaaattggttgcctgtggaaaaacggtttcgactgcactcatcaatgctaaatctctatctgtaacaatgaccttagggaaaaattcacttttaagaaaaatccctctaaaccgttcaagggcccacacaacattgtttgtacgttccgcctctaaataggcaaatgcagcagagaatgtcatcccagttggtgtgacaccaacaatgtcaagcaaaggtagtctatacctatttgttttgtatgtgttgtctatcaagaacacatatgatatgcattgctcaattgtattgcatccaaatgtgcccaaaacaagtcacgtacaacattttcatccttcaatctatgccaatgaatatacatgtcacgttcaagaagtttcatcagctgttgcatttcagtattattacctcttgtacgtgtgcggtatgcatatcttgcattgtatacttgcttcaaagttgtataattattgtcattgtgctccttcaaagttagaagaatatgttttgatttcaccatcgaccttgtcatataagcaacaattaccttctcctcctgactaagtcaaccagcatatgggtgtccacaaaatgacttagccaaagcatggttatggatgccacatataagcttcaccatccaaccttgacctcccgggactggtttgcctcacaacttaaacggacaatcacattttctagtactagtcgttgaaggtgtgaaacattttttgtatggtctatactttccactcctttcacagccaattaacacaaatgacgtccttcatattttcccgtcgatgtgtcactcctcattatcacagctacgaaaccattctcatttgcaatattccgagcccatctcaataccgcatcacgtgactcaaacacctacacaaattaataattcatctttaatattttaatcatctcacaaaatgtactacattcaaaatcacataattacctctgtcatgttaaacgttgcagaacaatcaattacacacttattgtcttcacacgcatcagcatccgctccaatgtgttcatccatataattttcttcagacataatactttcataaatccactcatcattgtccatcctaacaattacaaattttatttaatcattactaaaaacacatacatgggtcataataacattttctaatacacatcataatttccatacccaatccataaattaacacattttaaataaatcactaaagtctaaataaaagatcaagaattacataaacaatccttattgttggtggtggatttgggcttggcggtgttggcgatgggtcgcttcactcgagaccgagtcttgactcattggtgctgagttttgttggacgcaacggcggatggagtatgtcagagcggcacggaggctcgtcggaagttgttgctgcgttcctcccgcagccgcacccagtagctgacggcgatgggaggtgctgaggaagatgagggtgttttggtaaatggcaacaaaaaaaagaaaaataaaaaagaaacccccaatcgaacggcacaggttactcattcgtaagttacgtacaggtttcactttcgtaccctaaaattcatccaattttatgtatttataggcagaaaaacagaagatgaagcagtggaggcttgaaataaaagacagtgctgtttggcagttttgggttttctatggtcagtgtttttatctattcgtgcaatcaaacggttctagttttatcttgtgaatttgattgaaaaccaggatttgatatatgaaccgtatgatattcatcgacggttggaatatgttcactgtgtggatacgtggaaatgatagttgtggcgaatctgaatctgcggtgtttgggcttcgcatgaaagtgaaaggctagacgtctgatttatgcacacacgtcatttacgaaaaagtgaatgtgtggaaacacattgagtgcagttaatcatgaaattgatatctactatctatagaaagttcaactgaactacctgtcattttctcaaataacttacttccagcagtcatgttgcctcctccaccttaaacttctcctacaagtttctctctgttttctttttcttctctccaatgacagtcacccacatttaactcctcctccaagcctaaaaaaaattaatataatacttttttaataaaaaaattataaatttgagactcttttaaaactatttacataaatgaaactgtcaaacacgtataaattagacgtaattgaatgtctaatttgaacgtgttactcccactgagtcatgtctaaattaggtgcgttcagttatgttggaatatgtgtcactgattgctacatgaattataaattttaaatgatcataatttttgataaaaatgtccaactgaagtgtcctatatgttaaaatactcaaaatttcgaggaaaagtgatagacaaaaagatgtaattaataaaccaacagttttttcatttttcaagcattttgtgttccaaatccaatttcttatgcgttgcaggccacctctatggagcgaattggtcatcacacagaacagataaacggaagcatagtgaaagtagaagtgtagaacaaccaattctaaggagagagacttgccaccaaattgaacctacttcccttgaaatttttagcggttaaaaaattgggtgggaaattgagtgagtgaggttctcacactaactgagcagtggtacgacgtggattcgtcgcgttccttgaaattgaggtaaattacaaacaaatacagcagatgcagccacgatagacacaattgaggtcgtgttgcagtcgcaaacactttaaagactttgaaattgcggtcaaacaaaatcgaactcgtggacagttttttttaaaaaaaaaccttagaagttactaagcagatttggaatttcattgatccaataaatgaataaacatacaaggagaagagggaaagagaacggacctgatggtggcaacggcagtggtttaaaatcaaaagacacctcaaattcaccaaaagaaaatgatgttcaaatgaaagaaaaaaaaatattatatatatatatatatatatatatatatattaaatttgaatttatttttgtaatttaaagtataaacaatattttaatttaaaagacacaaaattatgatttattttatatacttagtttctgaaattattcaaaagttatataagatttttaaaatgatgattattattcaaatacctttcattaaaaataattgaatattaattatttaatatttaattcataatataattaaaatttaggtgtatatatatttatttatttttctttgtaaaataaggaaataggtctcagatatctttgttattttcatttttccacctatttaaaggactcttatgtaatttaaccgttatcatactatgctaacatgcccaatttatatttatttattttggtaatcaatattagcgcgaatcagttaatgagattaatgttagtcagattttccaagcacgtcattttcctttatactttagtgtatattggaaaaacgaataggcattaaccataagtttaaaaaattaattgtgttttattttattcaaactgttttggaatatctataaattcattttaaaacaattcgggtaaatttataatagtggtcttaatttttttcatttacattctaaattaatcaatataaattactaaaaactatattaatgattcattataaatatttattttaattcttatttaactttactttattctctcaattgtatgggtccttagcatatattttaataaaaaaaaacttattcaagtaatagtattagtatataatgaaatctttttttattctgaaaagtatataatgaaatctaaactaatttgccattgtttttattcatttttaagattcatgacaaaacgtttcgaaaaaaatatattcaataaaattctctacacaaataatattaaatgtggcataaaaatattattattaaatgttgttactggcttcacaattttcacaaacaccatttcacgagatgaacacgcacacccctagatgtaacatggtatcacggtattaatttgtttacctaaatttttgtcagtttttttttttaattcattaaaacacgtgttatgtttaattataacaattaaggtgactataataattatatattttgtgtaccaaaaaacaataagtatatattttgattaatctcatcagttaaaaaattaaaataacttattgtaaatatatattataatgactgcaaattaatttgaaagagatttgaaatcagttctaatagaaacattctgtgaataacatgaaaaagctattgagtcaatgattcatcagtcattagttaaactgcataaatacttacatagttataaatttacgcataaaaaatagttataaaaataagataataatcggatgaatataacatatagtagatactatatttcccttatgaagaacaaaataagagctggtttattggtaaactgtctggttcgaattctgtctatggtaaaagtcttgcgtttttgcagcagattgtgtgagcgagaaaaagcgccacaacgcgtgggaaagccagagaatggttgaataataagaagctgacccgtgtctagaagtaaatagaataaacatgtgccttcttttacaatatctcattgaattgaaaatgcctctgattcaattgggaaaaaaaaaaaaactgaaagcagtactaggaagaatcatagcgaaaatttctacacaaactaagcataaataatcaacttcctgtttttcatattttaaaaaaatgtttagaaataagtataatttaaaatgaaacacataatctaacctcctattttgtgttaagcagtgtgatgctggtaaatggtaatacctacctaataattttccggtacaataattcccaagctttctttaaagcatgtggaatcattaaaaaagctcgtgtagtgatactagcttatcagattgcaacttagcttccaaagatttctgagtctctgacaatcttcggttccactgctgccagccaagttgagtatgaattgctaaaaaaatcagatgataaaagcagaaagatcatctagcaacatttcagaaataatcatcatagtcattatagccgaaatcatcatcctcagggaaatatttgtcagccatattttcagtattttgatacatctctcgcatatcaccttcatcttcgaattcatccgctgatcccatctcatcttcatttttgtcctcaaccttggacggtttattgtcatcattatctatgggcagatcaaactgtactttctttggtttcttgagatcatcgttattttcctgcgtatgaaaaaacatttacatgaagtaaaatctcttgatttaaagaataataatataggtattattttccaaatgtcttttaagcaagttgtgataaagcaaatgtcaaactatccagtaaagcaagaatgaaatgtcacgcagaaaagacaaaatcattcagacctattggataattttttctataaacatttatagaagaaaaaaagaataagctaattttaacttagagaaggcaaatcttaacaatgtccttattggttaaagaactaaaagcagaaatatttttattggaaagtgtatgattactctgtccatgatgttttttgagctctcatgatctccacaacaaatatttttttcttttaatttcttaaccaatgcccttaggacacaaaagactcatagaagaaacttatttcaacttcttatttttgtcccctataagttcttaaagaaaaatttatccaaacaaaaacttaggtcatgtttggacttaagaaacactaatagaaaaagaaaataagaaaataagaagataaaatgagttaaacattctcttataagttaaaatcagattttggagaagctaaatgggacacctttctataagctagcatatgcataacctaatttttaacttaaaggaaattcattcattttattcttttattttcttcttgtataagtagctaatgagaagtttatccaaacaaggttttaatatgaattttcgtgttggtggaactcaaaaaagtatcaatattacatgcattaaaaagaaaaacagttctagagagaattaccatttcatcaaacaattcattcaggagttcaaaattgactttagatttgagaccctgcaaattctacaaaagcaaacaagtattgtcactaatatttcagaagatcttatgttaataactaaaatgaatctcaaggatttgaccaacaaagctgaacacacataaaaataatataaaaaaagaaccctaaatcacagaaaatcacatcatctctatctaaaatgatgtcaacaaagaagccttaaacccgaattctcaaggatttgaaattagagttccaagtggaactaaggagcaagactaagataacatgctaactccgctttcctcttctgttataaaatttacaacagttcacttttgacttccttttctactcgtctgttctgaacagttacaaaaccctcacccaagcacccacccagcaacaatccagccaatcacaaatcaacatgcccgatactctctgtagtttgaactttccagaaattaggcctataggcaatccacaaggccacaatcccctataccatatagatccacattcagcgtcacttgcattgtttaaccaggcaacccaccccttaatccatggtcatgaccaccacagagacatcagccaccaagtactcacactaaacatcattcttcaattccaaaagttcctcttttgtttccctcaattaaaacagatatgtagaacaagcaggaatcaaaaagctcaaggttagttgtgtgtttttctaaatcttttccagtctgaacaagtttcctcttggaataattttgaactactattattcatgataaacaaatgcaatatacccagcagaagggcgaactatcaactacgaaaataggaattaaaagagaacaaaatcctgaaatttaactaatatttaataatcagatcctattagaaaatacaaaaaacaaatattctcttaattacaaatgtatatatcataacctagtaattttgggattaacctaatcccttgatcctggggttttacaaaggaatcccatgagatttttagactatatttacatacacaagcatataaaatgcctgttattggatttcatttgaacaccataaattctagctcataaagatattggattttatgatccatcctaatcatataaaatgcctgtgatacttctttaggtgaggttgccaatcaagatacagggggcagcaagcacagttgtttctgtcacacaaaaaaaactgagtactctaaaggctgagaattaatttgaatcaaccacaacaaaggcagccaaaggcagggggagcagtcagccacaataaacgtgacagctattgtggctgcaatcaaggcagctagggttctttcaaaatagagggaaatatagctttattcctcaattcaaaagactgcatataatgtcaatatatagactaaacttcatcaatgataaaatctcaaaaaaagaaattaggaattttaaaaaaatacatacagccaagcaatatatacaatacatattacaagtatacaatgtatggggctacaaaaatatctaaagaaaatgtacgtctgttgttgaataaataccctttttttattagacatttggccaaaggcctctgcagcagattgagctggccttgtattttttgcctcataggctcgtttctgtctcatctcctgcaatagtgaatttaacaaaccaaaaagttataagcttgaagtcttgcagtagtttatgcagcattaatgtctaatgatactatgtaaacaaaaaaacaatgcataactattggatccactctaggacatcacatccattgaaatgtatattgagcagtataatcaacgtgaaagtaaaacaattaaaaaaaacactatgtcaatcacaaatatatttttcagtgataatgaccactttctacttgcactgagcatgaagtcccaattttttatttcgtagctactaattccaaactaacgcgcatcatgttagtaaaacatgaacgacattctagtacttgactactagtcataaatttacaatattggcaaaggtccactaataaagaattgaaacactacgacaattttgagtaacttattatatgtgatctttataaatcaaccattgaattgtgagaaatacagtgatcatgaatattaaatttcaaataaattggtaccaaaatctagtgataagttttatataattatggaaatcatatttatgttaattaaatgatgtagcaataaaaggattaaaatcaaattgacatgacacttcttgacatgattcatgtaaggagagataaaaatctaacagtggattttacgaaatatttatcttaagttacttgtggtctaatttcacatgaagaacctcacaagattcagaaagtacctttctggattttgccaccgcttcagtagaagatgcagcaagctctcttgccgctagtaaatcctctgaacagttttcaaaatttgcctcaaaagctttcttattagctgctgcagctgcttccttggctgcctgctcctgggaaaatgaaaaaaacttgagtgagatcctgtgcagattaacctcccaaataagtctaaaattaaacagaaaaccaggaacaaacaaaagtacaagcacccagttctgaatttgaatttctcctcacgatagaaagtggggaaaaaaactaacaaacaactttgtctagcactattaaaacaagaaaatagtagataaaatattctgtacctcaagataatcccaattcgctgtttcccatagtaacttcttgatatgcttcccctcctcatcatgaatgtacaaatcaacttcttcatcatcaatatcagataaagtttgtgattcatcttctccatgagaatcatcatttttaccatctttagtggcctcatgcacaacattagcccctaaatgcatttttgagcaatttaggaatgaataactgtagacaggaaatctaacaagctagcaagagtgaaagaaataagaacacccaccaatactttctggcacataggcatgcaaaacttctttgtggctcttaaactgatcatttgatgcatttgccaactaaccaaaagaaccagaaataatatatatatatatatatatatatatatatatataaagatttggagtttgtgttagtttatggctcttctaaattttatcagcaccatgttcagaaagagatgcagtttctggaaattgaaattgatttcagatgcccatatacatggcatcattggcttaagacaggatgggtttcatatacgataagtgctaaattaaagttaaagcttctaattgcccacattttcgaaaacactactcttctgagtattcttggtaatgaggggttacataatcatggtatggtagcgattagacagtgtgtgaacatgtgcacacaatattatgagtatctcttattacattaaatggctcatttccaaggcgtctcttaaacttttgctggattcattcaattaaaagtagaacattaacaggatctgatcagtattataaaaagaaactaaggtatgggcatggtgttctggcacgacatttgacaccagtatatttgtctcgtgttgtgaacatagattctcttctcttctgagatgaaaaatttaatggaattaaagagggttttatagcccctacttagttcttgaattgtttctttaatgcttccaattatatcaattttatttagcaatttaactatgaagtcaacaaaacaaaaacaaaaaatcttctttctgtacaagacatgccctagtgaatattccgaatcttctattgaacaatgttcaaaatgaaaactggaaaaattaacatggatactgatgaaaggaaatgcaaactaccacacacaagacctagtgaagggatacttacatcacatgcttcatcgacactctcctcgggaagtgtttttttaactctttccctctcagcacgctggaatgcaggaggatccaaaccaccaccaagtccaccagagagcttatcaaactgtgagtgtatcaatcagcgcaacagtaaatgccaaaaaacagtgtggctaaaaaagctaagcaacttgacaagaaagaaagtactcacatccttatagcatgcttcacataatccaagtgcaaaatgggtcaccccactatcctccttgtgctcacacagtaggtcttttgaaatacacccttttaatccacctcctggcattatcattggatttttttcatgctcttttgccattgtattcaactcctcaacctgtaaccgtaaaggttgatcaaaattctccactcactgtcaaatctaagatagtgaaactaagtacaagtctaaaacgcactcagtgaacttaaaagttcaaaattcacagtatagagctttgataatcacatatcaaaagacaccatggtgttaaaaggaggtagcaacatactgtcaagcttgaagactccgtatcctcaaattctaccagtcgtttggtcagtgttgcttcacatacatggacaattttaagctgcattgaaaattaaaaaatcaagggacacctaattgataagtgccacatttcaagcaatttcatgatcaaaaagctggcacttatcttttgatttatttcatttttcttagaaatttccctaaaacctagttaaaaagcaccttgtacttgtatttaaattgtttcggaagattgattcaatcatgttgtgtatttgaataggtttcatggaatcctaaagcttccagagaaacaaagaaagcaaaaaaaggtgcataaatcaaacctgggaagttccaaaagcattcaaggcccaaaaaccacaaaagccaaaggattcttcagcattaagtcttaagctcgcccaggccactgctccatgcctattttggtcgcccaagcgagcacaagtaccaaggagccgtcataatctcgcccaggcgagtgaattgtgaaggaaatgggcgcccaggctaccaaagctagcaggagagggattcctataaataggggcacgaccagaagaggaaatcataaattcttcactcctttctctcccaagggcaccagctgctcttgttttcttgttttcttagtttaagtgagtgtagaacttagggaagtgaggtgagtgacttttgtaaggagattctgccgaagcaaaggtcgatgacgtgcttaatcggtcaatctctcgaggaggttctgctcatgttcacttaagcttctctaaggattgggtgtactcttcttatccctatgctcttttaaattatttatgcatcgttctacttcttgttggtaatttcattctacgcttaatgcttgattctacttgatcactagggtcacgaacttaaattcctaagtgagactggaaagtaatcttagggtttgaactgaattaaattactcgttacgttatgttgctaggaatagagcataatgtttcgatcgcattaaacacgtgaatatgatcttaatgcttgggtatttaattaagtatgcgaggaatcgatatttagtaaaatatccatagggcttaagtgcgaggaatcgagttaagtttacctaaacgtgtgcgtcaacaagaatagaaaaatgcataggtaaaatcaatttaagggataagtaagacgaaatccaatcctacattcacttgacttgtatccgtttatttatttcccgtcatcgtttacttgttttccgttatctttattttacattttccgcaaactacaacaaatgaatcttcgctctttcctatctgtacataactactaaactgctaaattaaaacaaccgatgtaaacccaaatccctgtggagacaaacttttataaatttaaaacttacagcgataacaacggtacgcttgccgtggtataaaattcctaacactaatataagaaaaaatattaaggctcaattaacatacttggaatttagatcaatcattgagtgaagaaacaaatacatcaacaaatgtgcaactagtctatgcataagatcatgtcatattttactgctaatatgaccattctctctctccaagaacagaaatgcttaaatggaaacagaatgacagaaagcaatattaaaatacgaaggaaaatttgtaagtcatttacaattataacaggcacatatatacaaaaacataaatcacccttggtgaaaatgggcattgccatgtgcctgtctatccacatttttggaaaaaagacataagagagagggagggaggaggttgaatacaaaatgaaagaatataagttacatttatagcagtataaggataaaatagggtaaacaaatgtgtacactattgttgtagggaataagacaaaaaataggagaggaaggaagtcgaatagaaaatgagagaatgtatagttatatttacggcagttaaagggtaaaatatgtaaaatgatgtttttactatatttcaaagtttctcaacagaaattgaaaatcaattctattaaaattttgcacactcataatgcttgttaggacccacccccttttcagactgggttggatctctaatctaatcaagcaaaaacatataaagtgagagagagagagagagagagagagagagagagagagagagaagaaaagggaaagaacaaatcttctgtattatcaattaagggaagaagaaatcaaggacctgcggtaccccaaaggagcaatgctccttcacactgaaactccagtcgacaaatacaaaatcaaaatctgccctctattcctacctcaagggcttatttatatgcttctcctaattactgtcctatacaactattgatttccccttttgcccttcctcctataataaacctgcagggtctgtttgggcaactcagatactggtctaacagctagcaaatatttgtctctatacttcacagaccaacagaatgatgttgctggaatagtctaaacaaaacttttaaataaaaactatggataaagtattttctagattatcaattcagtaatgattatatccaacaattatgaggccctatataggttatagaaaatacccaacaagcaataataaaatcaataaaaagatggaaaactttagcgtaacttacaatatctggcttagagcacttaataccatgagcaagagcagatatgtataatgctgcaccgcataatccgctaggtttccccctgtctgtttttaatattagcaatgcaaatcttcataatataaagagttcataattcacatcccaaattaatgcttgatttttatccaaactaaaaaaaaataactaagaaaatcccagaacatgttaagaaacctgcatccagtcacgtttcatgcttgcaacaatggccagtgcggtatcagagacagccttactccctcgctttaacaaatccacatgaaagggcatcaatctaattgtttctccttgcttaaagaaaacaatggatagaaattttaaacaaaaaaaattcttaaacctaacctggattgaatatcttttcattctaaaaacatacaagttaggttgtcctaattattcattcttttatcaaaagataaggaaaaaaaaaaaacaaaaaatatgaagggaaattctctgaactcaaatcacagtaatttagattcattttcaaataaacataaatcactttaaaattttcttctatattctcaatttattcattgcagtatcatgggtacaggggaaatctttgaaggttaggatatggcaaaggaactagaagaaatgcaagtgaaaactctagaagcatatgagaggagtgtttatctgagaacaagcttaaagctgaataagctttagctggaggcatagtattaaagtgtgtttggggtccatgtatttaatcttcatgactgttaatatgaataaagttgcatcgcttattataatcatagggaatagtctccactaagtctattaagagtcgatatatgcggatgatatgcaaaacctatgtaattgttgaaaatcagaatattctgattctattaataattgcggtttataggaacataatctttgatttgaggaaatagaatatcctctatttatatataattaatgtaattaacctatataaacacgcatctaatgcgtactttgacacatttttcactcaatttccctctattttctcctattttaacatggtatctagaacctaacgaaaatcatgttgtccctggtggacccttctactcgtcgcaccttttccgatgatctttttaatttttattcagtttttctggcgacttttccgacctttgatcgtctctgttccggcgtgttttccaattatgctcaccactcatgttttcgcaaagaactttatcgtcgcctatcctgccaccatctttttctggcgtactttcctgccaccgcctgttgcttgtcgctcatttttgggagaactttttggccacctatcctaccaccgtccttttccggtgtgttttttggccaccgtcttctgcttgctgctcattttctagtgaagtattttttggctgcctatcgtagtgtaactcgcgctcaacactaagggcacatgacgctgtttccagcgcgacctatcctccgacgacatacccgccatgcgtcttcttctccagggaacctgttttggctttgtttggctcagtttgcatttgtttggcactatttggttcctttggctattgtatctacacatccagaagccaaacagccactgtttgggtgacctacagtccagcgaccgcaccactgtacttcgtctatttccagcgacttgtttaagctttttcagtgacctttgtccatgtgcgcaaccaactcaaaacactgcagcacacgacccatgcaggccctagggtatgaaattcatgcacacgacacatgatgcatctctgaccaacgtcacactggtctccatccggtgcaaccacatgacttgaaccacctttagtttctatcaggtttaccacatttgtaataagctaggttcatatcacacatatctgtagggggagtgtgagattacatgagcttacgtctattattcctaatattgtattaatatcagaatatcctatttgctattaatcgtaattgattgatcttgtaatcaatactgattccttctccatattataaatagcatgaggtgtggtctacattgacacaacattacagtaaaacactgttacagttttcactctattttcctttgtttctcctattttgacagtactatattctacatgaacaaaaaaagttttcatagtctaaattctctctaaatgattttcttagaatttgagtttggggctaattgaaccctacaaaatcggctttctaggtaagggttgtcacccacttatatactttaatttgatcatatcactagtcagcatgggatctccaatagatttgctctctctctctctctccctctctaacttcaccacataaccacaaaacagtctataaaatagcaatgagattaaaaggcaatagaaatccatttcttttgatgatcatgatacactaacaagttcccagaaatttattgtattctctctttttccccttcagtttgcatgttaggattgaacaatccttaacagtgagttattaatcatggcatgcacatagcacatcttttgtggctctaacataaaaatgtctatcttatttttgcagagtgacaaattcattcaagtctactgcaaataaactatatatcctgcaatataatgagattatcctatacaccaatcattttagttaccctcttacacaaaatgagctgtgaaaagaaaacactcactcttggtatatctatgaataaaaagactaggatcaacaggcatttgaacaattgggtgctctccaagccttaacacttgacaacactgcaagaaaactgctcctagcacataactgcacaacaaattcataaacaggaacaaagcaacattcagaaacacaaaaaaacagagatacattgagattaaatccactaaaatatggggggaatataaccaatgtcagactccagtaacaaaagaaaagcatactcacacatctgtccttaaaataatttgaaaaatcaataagaaggtatggtttattgttgtgcctgcaagaaaaatatattttcagcataaaaaataaagtactgaaaagaatatagatacaatacaacaagtcgaccagacacattattataaatcaaaggaggaaaagcaaattccattgagctcattgctcttcaaccacagtcgtacagcattattcacagtcaattactactagatggggtagacgactacaaggataaaacaacagcataatgttttgttataaatcatgccttgacaaacattcttaatcatctcacctatagtttttctcagtctccctccacccctaataactgagtgaacttcagatttcaaaactgaaaatgacttaataattttgtaaattgtattgatgaaaaaagaaaatctgatagagaagactctcggtgatctcactctatctctataactgaaaacccctcattattctctctccccttcccttattctttataactaactcagtacatgtcattctctccctttcttgctagctcagccccctattttgttgcttacgtctcctatagtaaatttgccaaaccatgggcctatttttcacattttgtataacccaagtcttcctctcaaatctcaattcctatcaccttccatcatatctaccatatttattgcggcttttaacaagctatgaatcatggactccaacacaaacaccaaaagccagacaccagacactccaacatgacttttatatatatatatatatatatatatatatatatatatatatatatatatatatatgaataatgagtcccaataaacttaggtaaaaactcttctaaattccccctaaataaataaagtctcccctaactttgtctatatgccctcccatccaatgtaatggtttagaaatttgaagcaatttccctacatcaattggaaatgcatgcataaatcgaaatccgaaactcaagcattcattgggatcaactttagaactaagctatgtcagtgtgtcctcctgtttcaacttctacacagactatatgtgcacacaccctaattttatatctaatctaatggatagagaaaaataaaatatgtaaacacaaaataatatatgaattaagtccaccacaaaaaagacaccaaaatgacttatgcaacaattccacacaaataaacaactatgaaagtacacactatccaatcattagtaacagacatgcatgcttaatacttaatgcaagaaaatgatacaaacagagtaatatcaatttaagaaatgataaaaaacaatggtttgaggtttatattaagattattatttgaacagctttaaacaagggatattcaaaatcttcacattgcatggttactcatgggaactataaaatgataattctttgaagtatcctgcaacacccatgccaaagagaactcataccggaatgcaatgtagagacaagcagcatgtacttgttctgatttacgtccacgggtgaaatttcgctcaagtgctatcttcaacaggcaaattcaaggattagttaaatgaaatagaaaaccattttcaaaacatgtgcaaataaatagaaagcaagttcaaaatgagtaagtcaaaactgctccttactttataaaaggtcaaagcttgttcagccatatgttcatcattaactccaaggccgaaacttaaatatttaatttcatcataagctgtgaattcaaagaaaataggcactaagaatataaataactacatgtatgaaattatttacagtaatcaaactgttcgttatattttggactagtactaagaataattatccaaatttctcttctatacattctttccctataatggtaaggtcatcctcctgcacactatcaattgattgcattggctgttgtgaagattaaaaatattacattttccctatcttgggataaatatgaaacattaaatttattattggccacaactttgaaatgaaccaggaaagaccagaagaaaatagcagaacttaacagatttaagactaacaataacaagttcaataattctcaaatatacgatgaggtattctatgctaaatgagaaaatcaattaatattaaacataaaaaattatttttgaaaccatcatttcaattacatcccgagtgtgaaatcagtcatgagacttaagaaaggcatacctctatctaaagtcctttgccgtgattcagagtactcactttgaactgttcttacataattgcctgataacttactctatgagacacagggaaaccatatgagaaacaaaaaaacatgcaaacaaaaacaagagtgtagaatgaaaagcaaaagaaatgctcatggagaaaacaattaaacgtgtcttcctcataagtcaccaatatccgagaaacttcagttcaactgttcaagcaccagacctattaattccttctataatgttctccattgacagaagaagcaaataatgtgccacaacaatatcttgggcacattttagaaaaatgctatatatgaccttaggagaatttggatcccctaccctaggagaacgacattgtcaaattctgcaaaagaaaagataacatgcatgtcttgaatataggacctcatggagggatccacatattctttccctgtcaaaccatacccataatcaaacttaaacctcaagtaatccaaatcccgatcagtccttaatagaagtagctcaagcccctctctcccatgacatgacattgttaatttaagaaaaagaaaaaataaaatttcaatctcccagaaaaccaccttagcttgtcaagcttccattacctgccctgctgcattcttaacaaatgaaggctcctcggcaaaaaagtaatcttccaacaccctcccacagcttccacaacatctgagaaacaaaaaaaaaaaaaagaaataaaaagcgttaaataacatcgtaggtttcctctaaacattcctagaaccatgatcaaatataatcaacagatccagattcaatttgtatattatctcacacatcttattagaaattaaaatgaaacaagaaaagaaaaagtgtcattcctgaattagagaggaagcactaaagatactcacaagaaaccatcatctagtcgctcgccggcgacatttttggcacagtgactgcagtacaccattgtggtggatacaaatctgcagagtcagtgagatggaggcactgaaaacgattgcagaacacaagtgaaaaaagatggagttgaattttttagggaattgggataaaaatttaattcagtcaggttttatcatttaggggagggtagggttagcaaagtgagccagcccaacaaaaacgggtagggctgatcctagcccaccaaaaatggaccgggctggtcctaacccacaaaaaaatgtggggcgggcaggctggttcacatttgcaaagtgggttggaaatgctagcccgccccactttaagatgggttagtgggtcagcaggccagttcacttaaaaaataaaaaagttaatttaaaaaaaaaaaaagacaaaaaaatcattgacataatcacataccttgttgagtaactttgtcactttgatattttcaatttgagtagcttaaagtaacaatttaagtatttaacaaagagatataaattattttaggtattttttaggatgagatgtgaggtacttaattggggggaaaatagaagatttgtgaaatctgccatataatttggtttggaaaatggaacctatggcatttgaaaggaatcttggatgatagaaaacttcaccattggtcttacactacaaaaattgaaattcaaggctttgcaccaccgtgcctctaaagctcccattctctcacaaatgactagctacctctccctctcaagtctcaatccctcttatttatgaacgagatgcctgatttcttctaaatatccccgcccaactaactcccacccttactaaatacactaaaagatatatacacaaacagacacctaacagaaacattttacacccttctctgtgttataataaattcctccactgcactgatacaagataaattccaatattccattgtgataatcaatacatcatgatacactgatacaacattcacatgccattgcgattctgcaaaaccactcactagaatagacgctgtgaccttgtgactgttgttagaatatatttagcctgtttggcattagggcccaatagggcccctatatcctgtgtacatatatatatatgtaatttgtgtgctgatataatagaagaagatatttttccctctttctctcaaacttggtatccaagcgcgcaggtggtccataccaccatccgccgccgtcctccgtcgtcggaaacttttccggtgacccctttccggcgagacccaccgtatcgagatcgtctcttcccggcgaccttttttgtccaagtgccattacttttcggtcatccacgtgtcgtcacgcggagcttttccttccgccctctctctcacgcgccggcgcgtgaggtgtttttccggccaccattcatggcccaagttgcacacaagcctcgctataataaccctgagtcctggcacggacggcgcaagttctgggcggatagctctggttgtctgtagaatttcttctgtagaaaccagttgcagggatgcggcgcgatcggcgccagtgtggcgcgatcagcgccatgcccactagcaactggcgcaagtggcgccaggtccacgctatcagcgtcattgttactggatgatggcgcgagtagcgccgggttggcgcgagtggcgccacagtttggggtttgatgctaatggcgcgaaagtggcgcggatggcgttggttggcgcggatggcgccagtagtggcacggatggcgccatgggctctgcatgttggcgcggtcagcgccagagtggcgcgatcggcgcggcatgtcggtcaggcccagtataaaaagggcattttacgaatttttgggccatttcctttcttcttcttcctcaagcgtccagacttccattggagagtttcccaagctccatgaactttgttttgtgacccaaatcaattcctttaaacacccaactagtgagaaacctctagtgagcttaaatccttccttgtaatcccttaaaaccccttaatcaaagaagtccctttcttaagggaaagttgaagaactcgagtttggcgaggaatagcggcttttcacggacacccgggctaagggaagaggtccagaggccttcctcaccatttctgaggtaagaaactcgagatttcccggttgatttgtgaattggggttttgagtgaatagtgacccacttgtgatagggcttgttttagccttgggtcctttagaaagacatgtttagaatgttgtgaggatgaaggattagctctcagattgtagtttggtgaactttagttttggctctatgtttatgcatgtgtggcttgtgttgagtcacttgatgatattgagacatgcaagagccttgttgatggttttgatgtgcctgagaggccatatgaacggtgtcttgtgtgtgatatggaccgttcaagccctatgtgtattctgagttattgggttgttgagagctttgagctcattgtgtttggcttgtattgagtctgtgatgactctaatgtcatgattaagctgggatagacctttgagggtctgtgagaggcctactatgtgctgggctatgatgaaccataggttagatgactttgagttatggaaaggactgaggttcctttcattgtggcagttgaggactgtttgatatgctgatgctttgtatacttgaattggctgtgatacgtgttttatgtgcctttttagggcttgacacctagggtgtcagtggcgtaggccacagagcagggaaagaactgtagagctcggctttgccaggtaagttcttggtccctgaggatgtttcccacttgtgtgctccaccacactccgagggagtgatggttgcattcatgatgcattcattgttggttgttgcatcctcataaagatatgtatgttgcatctatgcttgaacatgtatgatgcctgtggatagatcttctggccagtgagataagtatggacctccctaggaggagagcgcacctcctagtttggtttgctcgtgggtgatgatgatcccagggtgatgatgatcccttaagaccaagagataggtgtgtcccgtcgcggttgattgcctattctcggaggtaccatatacgtgcgtccatgcgtaaggggtagctcccgatgggatgacacgggtgtgagttccagtctcacactgaggttggcgttgatgatgatacgccgtacatagagcaagatgacttgcttgtattgttatgagggccgggaggccagtatgattgtgatgccctatgtttgtgtcatggaaagtgagtcagggtggaggaggtgtctccaaggaccctgagcttactgagatgtatatctcacccgtgtggggtttatgtggttacaggtgacgcttctggcagagaggagcggtctcagggcggaaggctccagcaataacattgttgcttggctgtggatagcagaagaggagctgagtagctcattttgctttgatatttgtcttgtgcccctgtagagggaaagtgtgtgtgtgctcacatgatatgtttgtatatgctttgtatggttgtgtataccctcgtgtgaggaagtggttttgagactaaggccagtgttggctcattcttttgtagaggcatggttagtgtcagatgatgatgtatatatatataaaacttgtttatgatattgatatgacgttcctcctgattatatttgtgagatattctggtttatctgcctatggttaagcttatgtttattggatcagcaggggcttgtttatgttacttgttgtttgtatgatgatgtttgttgtgatgggttttctgtgctccatacataatgtactcacgaaatacggttcgactcgcttccgccagttttaaataaagttttaagcgcaattctgatattgaaaatgttaatacaccggaggcctacgagctgttacactcgcctctttcccttggttctgtttctgcagttgttctttgagtgtgtccatcttttgtagcattcttctttttcactccttttttatcgtgatggcggagtcgtcttctaacgctacgaagggtatctcagcctctaacgcagtatcaggcatcatatctactgctgttccatccattactgctgcaaaactcattggttccactaattacaaaaacgggtccacctccgttaaaatctggtttggtgatcagggatattcggagcatcttacaactaaagctgccgacgttccccaagaaaggaagttagattggaataaagttgataatcagcttctgatcattctttggcattccattgatgtgaccatccttgatatcttctactcttttgagacctgttatgaagtgtgggaggaagcaaaaagtctctacacaaacaacactcagcaactctatgctattgtctctcgaatgatggaattgcaaaaatctcctgatcagaaaatggaggcatatgttggtaggagtagctccttaatgaaggattttatggctatgttcccttatgctgcaaatgccaatgaatataggaagcaagtagagcgtctctttatggttgtcaccctctttggtcttcccaaggagttggaaggtgtacgagataatattttgaccagtggtgaacctacactttcacaaactttccaacgcttattgaatctgaaagatgagaccgtctctacacctactctcggttcagtaattgattccactgccctcatctcacatggtaatgatctcgtggaaatgctggacgaggtagaggacgtggtcgtggccaaggtggacttggtacgaggccttattgtaactattgtcagacgcgtggccatgttgaagagcgttgttacacaaagtatccacacttgaaaccttctcctgctgctcatattgctgatgttgcctcatcttcctcctccggaccagtctcactctttcaggcagaatatgaggcttttcaaactctgctgaagaaggcctctcttcagactaccactccaaatactggaaatcatgttgcctgtctatctcgatcatcgcttggcccctggatacttgactcaggtgctatcgatcatctctatggtaataaggatcttttcactacttactttaacaatttaccctcctttacccttgccgatgggacaaaggctcctattcgtggtgtcgggcaagctcgaccaactccttccttaaccctgacctctgtttattatatccccggcataccttataatttgatttttgttagcaaattgatccgttccctatcttgcaccattaccttctctaaccaatttgtttctgtgcaggatccaagtatggggaagatgattggagtgggtcgtgacttccgcggtctgtattatttgacggtgtctcctcactctccaattgcatgttccattgtagagtcaccggaactcattcacagtcatctaggtcatccaagtctctccaaacttcaattgatggctccctttttgtcgaatattaagaccctagagtgtcaatcttgtcagcaaggaaaacacactcgctcatcttttgctaatagagtcaacaaacgagcatctgctcccttctctattgtacattccgatatttggggtcctagtcgaattgtatctgttttgggttttcaatattttgttacttttattgatgatttctctcgttgtacttgggtatatttaatgaaaagccattctgaattgttctctatttatcagagattttgtgctgaaatacaaacacaatttggtacttctatacgtatcctacgcagtgataatgctaaagaatatgtttcctcctttttctctaagtttttagtcaaacagggaaccctacaccaaactacctgtcctcacactccacaacaaaatggagtggcagaacataaaaatagacatcttgttgaaactgcccgcacactccttatccatatgcatgtccccttaagtttctgggctgatgctattatcacctcttgctttcttatcaatcgtatgccttcatcggtacttaacaatgacattccacacaatatccttttccctgattcctctctttatcctctctctcctcatgtttttggttgtacctgttttgttcatgatctcactccaggcaaagataagttaacatctaaagccttttaagtgtctattcttgggttactctcgttttcaaaagggttaccgttgttattctctcgacctcaagcgttaccttgtttccgctgatgttacctttatggatcaacaaccctagccactcctttatcccaggttgactatgctctacccattcctacccttcctttgtctcctccggttgtcactgattttcggcctgagaaccgtcccttccttacctatcagcgtcatcctcgcttaccatccgatgtcaaccctaccatagttgttcctcccactgactcaccaacctctccagttatctcatcccctccggctcctacacaagaaactactcccattgcactccgcaaaggtatccgcactacctgcaatcctcatcctctttatgcttttttgagttatgctcgtttttcttcatcacatttttcttttgtatctagtctctcttctgtttctattcctaaaaccacaggtgaagctctttcccatccaggttggcgccaagctatgattgatgagatgacagctcttcattctaatggcacatgggaccttgtttctgttcgtcctggaaaatctgttgttggctgccggtgggtgttcacagttaaggttggacctgatggcaccattgatcgtctcaaagcccgactagtagccaaggactacactcagatttttggtcttgactatggagatactttttctccggttgccaaaatggcctccgttcgcttatttcttgctcttcctgccatccgccattggccacttcttcatcttgatattaaaaatgctttcctccatggagacctgcaagaggaagtctatatggagcaacctcccgactttgttgctcagggagagtctgggaaggtgtgcaaactccgcaaatctttatatgggttgaaaaagtctcctcgggcttggtttagttgctttagttctgcaattcaagcctttgggctgatccgtagtgaggctgatcattctgtcttctacaggcatagtgatgctggtcgatgcatttatcttctggtctatgttgatcatatcgttattacaggtagtgatcatgttgggattgaccaaatgaaacgttttctgttctgccagttccaaactaaagatcttggcaaacttcaatattttctaggaattgaagtggcacaatcccgacaaggcatttccatttgccaaaggcagtatgcattagatatcctagaagaaacaggtatgttgggttgtaaaccagtggatactcctatggaccccaatcttaaactgttacctggacagggggagctcctatctgatcctagcaggtatcggagacttgttgggaaactaaattatctcactgtgacaagaccagatatttcttttgcagttagtgttgttagccaattccttgattctccttgtagctcacattgggatgctgctataaggattgtcagatatatcaaaggagcaccgggaaaaggtttattatacaaagatagggggcattctgaagtgtgtgggtattcagatgctgattgggcaggctctctctcagatagacgctccacttcaggatactgtattctcttaggagaaaagttgatatcttggaagagcaaagagcaaactgtagtggccaggtccggtgcagaggcagaatatcgtgccatggggatggcaacatgtgagctcatctggttgcaacaattgattgaggaactacatatttgtgagcagcggcctatgagtttgtgataatcaggctacactacatatatcttcaaacccagtctttcatgagaggaccaaacatattgaaattgattgtcattttattagagagaagattcaagctaggcagattgagacagcttttgtaaactctagtgatcaactagcagacattctcacaaaggctcttagaggacctagggttaactacatttgtaacaagcttggtgtctatgatatatatgctccagcttgagggggagtgttagagtatatttagcctgtttagcattaaggcccaatagggcccatatatcctgtgtacatatatatatgtaatctgtgtgctgatataatagaagaagatatttttccctctttctctcaaactactatgacgccgtaaccacgcgacctgacgtcgtgatcccgactagttgaagccatggcctcgtgaccgtgatgtcgtgaccccgacaagctgaagctgtgatgtcgtaaccccgacgagctgacactgcgtgcctctctcttagtctctcactctctctcaagctctcacagcctttgtcctctctcactctcagtcggattggccaggctcatttagtcattgtgggtttaaaatctcagcacagcccactttttcatggatcaaacgggctagtccgccgagtcagacccgttttgccaaccctaagggaggggtaaataaatcagccaaataaattagaaattaaaataataaaaatcgaattactacactcgtaaatcaattgatagaaactatactatcttaatcaaagattctgatcaactgatgcaaactaatttcaacatcaacattaatagcacatttaactcaagttaattgggatcagtggtagatgaacccaatgatagatcggaaataagacaaaaaagagaaagggagaggggtagagaaaaggggaaataagacaaaagaaagggaaaaaaaggtgaaaggaggagagaaataaagaggaaaagaactaaaaaaaagggaacgactgaaatatagatgtactaataagtttaaccctccaccacgtcctaagacacactatccgccaatctatttcccactccattaacttaataaaaaattaagtcccagacttggagagcatggcgtacagcatggtgatggagaataagaataattctctatttattgaatatgaattctgttacaactctaggaagtgagcctagcctccctaaccacccaaggataatttcccttccccttaactaacttggcaatcactatttaaagctaactaacttcactgtaatcactaacagccaattacaggtcaccctagctatttttcattcagttgtaactgacatcagtcagttacaggttttactacttgcccctgcttcttcctaaacctaccatgggtccttgctgcatatacctcctttatttgaggtctaacaatactcccccccaaaagagccaccttgtcctcaaggtgaaaagcaggaaattgttgttttattactgactcatcttcccaagtggcctcaaaatctggaagatcctgccattgaatcaacacctctgttgttccagctgaagagtttctcacagctttcacagccataggttcaacctttaattccaaatcatccattaatacagcgggtagcggttgagattttgctgtaggagaaatcgcttttttcaacaaaagaaacatgaaaaactgggtgaaccttactcccaattggtagtttcagctgataggccactttcccaattactttctcaatctgatatggccatagaatctcgggcctaatttctcattcaacttcttagccaaagatcttagcctatatggctgtaactttaagtaaacccaatctccttcctgcaaattaatatccctcctatgcttattagcctggcttctcatctggtcctgagccttaagcaaatttttcttaagttgatctaataacccatccctctcttgtgtcaatctgttcacttcctccaccattgatggaaccgttgtacctttcaataattgaggtggatctctaccatataaagccttaaaaggagttagctgggctgaactgttataatttgagttaaaccaaaactctacccagcataaacaagcaggccagtgcttaggtttctcccctgtcatacatctcaaataggtctccactcctctattaactacctccgtttggccatctgtttgagaatgataagctgagctaaatttcagctttgttcctgcacttttaaacagttctctccagaattgactcaagaaaattttatctctgtcagaaattatggtagtcggaaaccatggagtttcaccacctctttcacaaataattctgcaatgtccttagctgtgaaaggatggctaatgggaaaaaaatgagcatatttggttaacctgtccaccaccaccaatatagcattcttcccttgtgctttaggcagcccctctataaaatccatagaaatgtcagcccacacttaagtaggaataggaagaggttgcagcaacccagctggagataaagcttgatatttattctgctgacagacctgacatccagcaatgaatctcataatatcctgtctcatcccctcccagtagaccagagctgcaatccttttgaaagttctaaaaaaacctgaatgacctcccaccttagaactatggtattcttgcatcaacacaggtatcttatgagatttctttgaaagcactaacttaccattataccataatttcctattctttaatgaataacctggatgtgcagccttattcaccaataaatcctgcataattgtcttcaattttgaatcagctaaaatttccaactcccattcctcctcatcatcataactaatcatagaaattgctgtaaatgtcatccttctggacaaagcatcagctgccttattctcacaaccaggcttatacaaaatatcaaaatcaaaccccattaacttggaagtccacttaaattgttcctctcccattaatctttgttctgtcaggaattttaaactcttctgatcagtcaaaatagtgaatttgctacccataagatagtgtctccacttttgcactgctaatactatagccatcaattccctttcataaactgattttttctgagccatttctgacaaagattgactccaaaacgctaatggccttccctgctgcataagaaccgcacctagtcctttactagaagcatcagtttctatagtaaaaggcttagaaaaatcagggatggtaaggacaggaatctctatcatagctgattttaatttgcgtatagcttcatcagcttcaaccctccaatggaagctatctttttttaacaaatcatataaaggtctggccaccttcccataattctgtacaaatctcctataataccccgtaaggcccaaaaatccccttaaagctttcacattctttggaatgggccagtttctcatgacttccagcttttgtggatctgctcaccccttctccagaaataatgtgtcccaaatattccaccttatgttgcccaaaactgcatttcttcttattaacaaacaattcattctcaaccaacaacattaggacagctttcacatgcttcacatgatcttccttattactactataaatgagaatatcatcaaagaaaactaatacaaattttcttaagtatggcttaagtacctcattcattaaggcttgaaatgtagaaggagcatttgtaagcccaaaaggcattaccataaattcataatgtccttcatgagttcgaaatgcagtcttagcaatgtcttgctctctcatccttatttgatgataccctgacttcaaatccagcttggtaaatacagcagctccccccaattcatctaataattcttctataattggtatagggaatttatttggaactgtcactttatttaaagccctatagtcaacacaaaatctccaccctcaatcctttttcctcaccaatatcataggacttgcatatgggctaacacttggcctaataatacctgaatccagcatgtctttcaccatcctttcaatctcatttttctggtaatgaggatatctatatggcctcacattaggaatttcagctccattttttaattcaattccatgatcattcttccttgaaggaggtaaaccactagggtcttgaaataccaccttaaattcttccaagactgttttcatccatataggtaccaccttcccatcctgctcctcttgtaattctttacagcataacagaaaaccttcaccctcattctgcagagccttaataatggaattaaatgaagctacagacctcattaaagcaggttctcctcttaacaccacagaccctccatctttaggaattttcaaggtcagctccttgaagtttgcttttatttctcctagagaagctagccattccatacccaacaccacatccaccaccttcatgtcaaaaacaaataaatcttgtataatttgtaagccttgtacctgcaaatgaacatctctgcacactcctccacacttaattttcctcccatcccccacttccactgtataaggttgggtctctatcaccggtaactgtaataacctcactgttgcagttgaaatgaaattatgtgaagctccacaatccaccaaaattactactctgctgtcctcaaccattccccatagccttattgacctttttgatgtcaatccagccatactatacaaagataactgcattttctgaaactgtttttcatcttcctcatctactatctcttccatatcctcattctcctcttgttctgctgccataatcagaacttgcaactgcttgtttggacatacatggcctggttgaaacttcccaccacatctataacataatcctttctctgctttctcttgaaattcagcattagatagtcttctaaaaggtcttcccctgtatgatccatttgatttcacactgctggaatcccccactgaaactgcttcctttgtctgagagcttttaattccaggctcccatgttactgttctatttgaactgtaagttcttgctgccatcatccctctctgatgtccctcccttcctctctctatcaactcatttttctcatcaatcctttgagccaaatccattaattctggaagtgaattaactggatgcaattttagctctgctctaattacttccttgaggccatttaaaaaaattcccttcaagtattctggttcagttcctttcaaaggccctgcgtacagctcaaacctctccctatactcttccactgaattattctgttttaagctcaacaatagctcatatggactttggttcattgaaggctgaaacctttgaaccactgcacttttgaaatctgtccagtttgggtgttttgaacagaattcccaccactggaaccaattcaatgcttttccttccatagcaaccatggctgcttgaatcctctcctcctctcctactcctttcacttcaaaatacctctctaccttattcgtccatccgaaagcgtcctcaccattgaagataggaatctccaatctcctccacctttcttcacgatcgctattgctattctcacggcttctccctgattcgccgttcgtgccgctgtaatcgcgacttctctctattccgccattcgcactacggcatccactcctatgctcggaatgctcctcgcctccttcatgaaggtcgcttctcgaaaccgactgcagtgaaatgttcttcactgtgattaacagttccgccattctctccttcatctcttctctctccaaacgctcctcttcgcaccgttttctcaaaatcgcaacctcctctcgtgtttgcatcaatccttcgaatcctctctccaataactccattcgtgcttccatacctcctcgcgtcccaaccatgaaccaccgattcacctatcgccgatcgccgatcttagcaattcgtctcactcacaggatcgcactgctctgaataccagtgatggagaataagaataattctctgtttattgaatatgaattctgttacaactctaggaagtgagcctagcctccctaaccacccaaggataatttcccttccccttaactaacttggcaatcactatttaaagctaactaacttcactgtaatcactaacagccaattacaggtcaccctagctatttttcattcagctgtaactgacatcagtcagttacaggttttactacttgcccctgcttcttcctaaacctaccatgggtccttgctgcatatacctcctttatttgaggtctaacacatggtcactccattaatgcaccaaaaggaagaaggatagtgttttaggttttcttatgccctaatacacaatcatttttcaccagcccaatttaattccagccaagcatagcctaagcttgcaatgctttgaagctaatttctattaaatgacaaattgataacattatggtgactggtgcatcaatccagacacagtgggtcactcttcatgggacatgtttacaactgttcatcaataaacaaaagctcccttgaataactgaattgtaacatcagttatcacctttatcttcatagaccacaacagaagcagaaccacatgagtcttgagacttcagatcagaagcagaagcattagcatgagtctcaatctgtcaatcttagattacatcatcagaagaaaagtagcactcaataaccatcagacccagtttttcatcttcaactactactacgtaaattcattagccctaacatatacaagaagttgtttcctagtgatttatacatcacgctaatagcacaaatttaaccaaaaagagttacaattgaatgatgcaaacaaatcaaaagactataatacttttctaactcccaataaccctattcaggttctatctacaattcccaataacgaaaatgccaattatttaaaatcaaagacttagaatgtgcatatctctcttttcatttgtgttatttccttcaacattgtgcttccagtattgataactaaggtattcctaattgagcttaacaactacggtttcagctactaaagcccatgatgttgtacccttacaagtctttttctttcatgggtctgtctagcaattgaagtatttatcttaaagaggaacgagagttgccaataggtttctgcttctatttagacagtagtaaaaaccttcaaattgttaagtagttttgtaggtgtctaaactcatgtcctttttcgctaatgttcattggtattgactatggttggctctggcaaaaggttgagagaatcacaaattcaagaatgggaagggtacatgtacatttattgactgagaccagctactatcaaattcttgaaggacttttatttatttatttgactgacaccagaatcaatctaaccattaaataatcaggatacaatagctaatgaataacttttcatcagcacacaacttcgctttcccccttatcttaattgaaatcttcaaagtttagcctcatcataaaattggcaaagattcctgtgtgtattccaagaaaccaatcacaaaaaacaacactacgctcaactacttcgattctcaattcaacacgatgtaattaataaaccaacaatttttcatttttcaagcattatgtgttccaagtccaatttcttatgtgttacaggtccacctcggtggagcgaattggtcattacacagaacacataaacggaagcatagtgaaagtagaagtgtagaacaaccaattctaaggagagagacttgccaccaaactgaacctccttcccttgaaatttttagcggttaaaaaattggggggggaaattgagtgagtgaggttctcgcactaactcagcagtggtacgacgtggatttgtcgcgttccttgaaattgaggtaaataacagacaaatacagcagatgtaaccacgatagacacaattgaggtcgtgttgcagtcgcaaacactttaaagactttgaaattgcggtcaagcaaaatcgaactcgtggatagttttaaaaaaaaaaaaaaaaaaccgtagaagttactaagcagatttggaatttcattgatccaataaatgaataaacatacaaggagaagagggagagagaacggacctgatggtggcggcgatttatggtggcgtgccggactgttccggcgtgccggtggtctctgcgattgcaatgcgagctaaacgaaaaaacgtgaaagaaaggaaacaacagaggtgagaaaggactcaagaaagagggacagaggggatgaaaagctcgacacgatcgagggagtgggtcggggagggaaggtagggcgcggcgcgctcctgttttataaaagttaaaaaaattattttttatcaggaaagttaaaattaattaagctactgtatcttcttattttgtgaggaaaaaaattaatataatattttttaataaaaaaaaattaaatttaagattgttttgaaattatttacataaatgggacggtcaaacacgtccaaattagacgtgaatgaacacgcctagggagtaactattttgtggctgaccttcattaggaatttaggatttttttttttttaaatcttggttagggttaattttgatctatctcaattaggatcaatttaggataatctagtttaattgcgatcaatcttgggcttgacttatttttggttgattttagtcaatattatttttgattgatcgtaaagattgattttgattaaccttgacttaagtattaaaaaagtactctatccaaacttaaatataaacaaaattaaccaacacaccaattaagaaagttggttaatatatttaatattttattttttattttagaaataattatttttcctaacacgcccttcattattggaatttgatattatgaataaaaaagaattattagaaataaatatttaactaattgaaggaaatttttttaatactatcattaaataaggtgaaaacagttaaaatttacttatatttacaaatcaaatttattttttttcctaatatttaggtcaagattagtccatcataatattaaaatttaggattgtgcttcatacaccacctgcttttctacaacaccattttaaatttttttataatactgaaaatgcccttaatgactgaaaaaacacataaatgtagaaagtgcttcacggactccttacaccattgatcaccattttgagctgggcattgcttggaatcatcttgtgagctgtttgttttgcatttggtttgtttgaggtgtgcgttctgcattcttggaggaatttttggttgggtgtcatcggagtgaaagcaagtaagccctcgcagctaatgtccactgcctagcttcacacttctgatagtacaagtctcgtagcccggaaagccgaacatatgccccatggcattgggtcgtctcagcatcgacttcttcaacggttacctctagcaaatcaaccaacatcgtaatcgcctctcctatgtcgattgcctcataggactgcaacgttcccatcatagggatatgcaagatcgaggccacatcatccagtgtcacttgacttcccccacaggcaggtggaaactactagtttcagggtgtcatctctccacaaaagcagatagcaatcccctgtccccagtctccacacaacaagagatcaaaggagctagccccgatgcagccactaagccctggatctctgacgctggcttcccaaatttaatcactttccgtccgtgggaagccaactttaactcagcacgttcctgcaacaaagagtatatcagtttacatgtatattatgaataataatacttattaaggtatgaaaattaacacaatgatacctctctggcccacactctaagggcaacatgatccgcataagaagtcaacacgggacaatcctctagccccccctggatatgactctacctcaacaccaacatcctctgtcccaatgtcctgtgtcccaggaatatcggtatccatatgaggttcctcaagaacgggatcctcagcaacaacttggtctaacctttgcctacggacggatgtcgtaggcctacgcctctgaacagactcatcttcagtagctctactacttccacccactttctaaggcattcatctagtcttgaccatgatctctgtgtatcatttgtagacatgtcagccttcacttcaaaccaaaccaagcaacaacaatacttaaccattacatgtcacttgtgacttcaaaccaaaccaaaccaacccaacccaacaacaatacataaccattacatgtcgctcatgacttcaaaccaaaccaaaccaaatcaacaacaatacataaccattacatgtcactcatgacttcaaaccaaaccaacaataatatataattattacatgtcactcgtgacttcaaaccaaaccaaaccaaaccaacccaactacaatacattaccattacatgtcacttgtgacttcaaactaaaccaaaccaacccaacaacaatacattaccgttacatgtcaatcgtgacttcaaaccaaaccaacaataatacataaccattacatgtcactcgtgacttcaaaccaaaccaacccaacaacaatacattaccattacatgtcactcgtgacttcaaaccaaaccaacaacaatacataaccattacatgtcactcgtgacttcaaaccaaaccaacaataatacataatcattacatgtcactcatgacttcaaaccaaactaaaccaaaccaacaacaatacataaccattacatgtcactcgtgacttccaaccaaaccaaaccaaaccaacaactatacataaccattacatgtcacttcaaaccaaaccaaaccaacaataatacataatcattacatgtcactcatgacttcaaaccaaaccaagcaacaacaatacttaacccattccaaatcatactacacaagcattaacaactctcaattatcccaacttatacaaaagcaaaatgtgattcaaacatgtccaaaacacaagcaacaataacaatcaagcattgcaggtcatgctatagtaaaaaatttagtgaaatgcacaaaaaaattccaaaaaaagtcgatacggattgagtaatccgtaggcttcatacggattacctaatctgtataaggcttatggactacttaatccgtacgccttatacgaattaggtaattcgtgtgaggcttacggattacttaatgcttaagcttcatacggattacctaatccgtataaggcgtacggattaagtaatccgtaagcctcatacggattacctaattcgtatgaggcttacggattacctaatccataaccttcatacggattacctaatccgtaggggctcacggattacttaatccgtacgacactaaacatcttctacggattatcgcatccgtttccgccatggctgagctgcaacagcctccacacaccaccatggacaagtattaagaaacaaaccactcaccaaggtcacaagacgcacaaacgaccaccaccaaaggcatgtatccagattaaccacgaaagaaacaaatggtgcggcagaataactggaagcacgaacgaaagaatgccaatgcgctggtggcagagggaagaagaacaaccaattttgtcgcagagggaagaaaaacgaaggcgaatgcggtggttgcagggggaacaatgttgctaattgcagggaagaagaagaaaacgttgagaagtaagaagaaaagttttaaaaaaattatattattaatttgtaaattaaagggctttagggaaatgcactatttaataatgatgtatgagaatattatatggtgtagaaagctcatgcctaaaatttaaggttatccatgatcgaacggtcctagcccacatgactctttggtcctgtgcatttttcaatgcaagttttttagtcttgtaggcttttttgaccttggtccacactggtcagggtcaaccggactattttaatagttttacctattttatctccattatttaaaagcttaaaaggcttaggtattgatttccgttttttcgaagatgaacctaaacatttatccgctttattttctaacatgatccaccactaatttataccaaagagaagagaaaactcctatcaatttctgcttattaaaaatatcaaatctcaaaaagattaagaaacacaactttcattcatagttattatggttcttttatggagcaatggagcatcattagcaagaacaacactaactgaatccaatatactctgatcactcctgtgtccttgtcctaagttattacactaattactaataacataaaaactccttgagcagtggacttgctacatgactgcaacgtgtgtccttgtcacaagttattacactaactacattcaaactcctagagcagtggactgttacatgtgttgcatctagcacattattcgccatcccagagttcttcaacagtcttatagacaccattttcttgaacaaataatccagtaccgtctataagccttctctgcatgagtaaattgcatgtgttactcaaaagttgaagcttttacatgctgtatcgcatttgcatttgacaaaatagactatgcactaatagtataaaataattttatattatcatttaatcacaaattactatatataataagcttatcaactattacaataattactttcaaaatcatgctaacagtgatttctaattagttcccagtgaaaaagttttgatgcataaccattcaattctaattattttgtgccacaacaaaatgtacccctcccctccctcgccaaaatatattagaggagacaaatgtcaagagatgaaaaagagaataaaaattttgtaagataaggttaaattaactacttgcctgtttaatttcagagaacttagcaatcagctcttcaggaatagaccagttgaagacatcaaaattttccttgatcctagcttcattagaggtctttggcagcacactatgccccgtttgtatgccccaccgaagggctacttgtgcaggtgtcttccccagtttctcagcaactaaattgataacaggattcttaagcacatcactgctgagaaatccttgtgatcccagtggagaaaatcccttaaaaaagaaatttatcataaatgataattagcaatcaatggtttttgagataccaccattagaatatgtaccaaaatcatcatcattttgctttagaaaagtttatgggaaaaaattgtctttcgttcttgtacctttgatcaaacttagttctactttctataatttcaaatcaatgacatcattcctccaacttttaaaatacatgatttttatacctccaatatatgattttgtcaccaatagagttagtggagacgaactaaagtcacatatttttagaagttagaggattggttttatcgatttgaaaaaacaggaactaaacaaagtttgaccaagaatatagagactataaatactttttttcccaaagtttacaaaaaaaaaaggaacaaataatttaatcatgaaccctcaaagaatacgcaatgaaccactgaatctaatttcatatatgtaacataaaatcactttatgtgctacacatacagataggtgtattcctttagatgcacagaattcatgcaactttggctgctgccattgtgggtggcattccacttggttaacagcaggaaccactcttgctatatctaacaaatcttgaagcttctttgaagagaaattgctcactcctatggctcttgccttgcctgagtcatacaatgcctccattgctctccatgtgcttgggatgtcatgttgtataacattttcaggctttactccaactgctccctttttcatgcaaactggccaatgtatctacaaattgaacctatgtatcaatggatgacccttattggcaattagctataactatagatattttgcatacaaattaatgtatctatacaaattgaaccatttccattgattaaagagctagcttaatcatcacccttgattatcgacaattagctattattgtagattttttgcataaaacaaaatcaagaactgaatttagaaaccatgatttgaacttattttgcataaaacaaaaccaagaactgtattcagaaaccatgattggaacttaagagtgtttagtgtccctcatcttcaatagaaattcacaaagcagaaaagaaaagataacacttacaagatagaggtcaacgtagtcaagttgcaattcttgtaaagttctttctaatgcttttggtacatcttctggatcatgatctgtgcacctggatatagtcaagaagcagaggttctctgttgagaaaccaaatacaaacatatgtttcctacattgagaaacttcacagttttcaaaattgtatgagaagacaataaaaccagagtttggaggtgatccacaagtcctcacgcttcacaacaccatcttcaaaaagtttcttgagagcagaaccaatctataaaaaccaactttctacaatcaaacaaaataagacatataactttacctaagaaaaataagttttcagtaaattgatgagattctaatatgcaagtaaagtaagtatatcctgaggcatatcataagtaattctttaccgtatgataaaattcataatctgtagtactaacagtgccagtgagcaaagggaggtgaacacaaaaaataaaaaataaaaaaagtatgattctttattatacgttgtagtactatataatcataatcattattatcaaattacctctgcttgattgaaataggattcagcacaatcgatatgcctgtaccccacctgaattatcagtgatcatatacaatagtcagccaactattctacattactacatacaataatacaaactagaattgtttacgataattcagataatctaaaccaaggacaatctaaaatgaaatctatgaaaatattataataaaaaaaaaccaacccataaattagaaaatagaaattcagttccactataccttgatggcagtggtgacaatagcaggatcaacgctaaatgtgcctaatccaattgaaggtatcttggttcttgtgttcaattcaaaagaaataattgcgtttgtcatttttctggaaacaattaaaagctcaactgagagagtcgagtttcaacagaaatttttgatgaactagtaaatgaaggagctcatggaaaaaatgaagatggagcatgttggtatgttaaagattagaacgctttgtataaagacaaaagctattagctgacgtgtgtgcatatgtcatgagtctggcgactgatgagtatattatactgtagttgctgcattattgtcactagcgtcatcaatacggtttcgaaacccgtgggccaaaatttaaaaaagttgtaattgattcagaaaatggatacggtccacttatgatctttttcattccggttgaacatgtggtggattgggttattctatctaactcatctaaaaaataatctaatattttgtaatattgtttcaaaagaattttaatatttagcaatattatttaaagacatcaaagttcaaagatttatacttcaaatttatttatttagtgttttatttaagattattttattctagattcttctataaacatgaaatgtttgtcattttttttaattttgttattatagttctagtttgtgataatgtcttgttataggtatggtgtgtgaatagtagtgaatttaatttaactaatattttttctaacttattcaaatttatttttttaaaaaacatttattttctattgaattttcttttataaaaaattattatttttttatttaaggtggattggtgggccaacctgtggtgggccaggcaagaccaatattttaaagactcaaccttaagtaagccgagttgggttggtccatttataggatgggttgaggtgggccagacccaacatggcaacctaatcctttttgacagctctaattgccagtcgcttaggaacctacttgtttaagatttcttattttatattcatttcaattttttgcctctcaaaataaagttggtcaattaaatgacagttttctatgtcgttttctctctcttgtgtgagacgtgtcgttttctctcccttttgtgagacatgtctttgctcgattagggttttagtctgtgtcgttttctatggtttttcaacaacttgctgattatgggtaggatcaaaccaggggaaacaccgaaccaagtgcctctgttctctaccccattctgggtcaaggtctacattgtaactgtagggtttatgactcctatggtgggcaaatccttggggaattttataggtgaatttgtagaatatgaaaaaacaacaacaaaggggggtggcaccgatacatgagaatcaaggttaatgttgacgtcaggtgatggggtgcgggattggggagctgatttaagaattgaactgacaaggaaggaagggattgaaggtgggaaatggcttaacgaaggatctgacgggaggggtgatgaggagaatggggagaaaacatagacaaatagtggggggagtgtgccagagggtggagaaaaggagcacataggagaaccatcacattgggatcttgtgaccaatggtgaaggcgttgggggaaaaccttttcaaataaggaactccctagtgatggaggtccatcacaagttcaaggccaaggaggagaacttgaagagcttcctttggttagctttagaggacccatgacaagagctagaactcaagcctttcaagaacacatcaaagttaatttgcacctcttagacaagcaggaagaagcatatcaactcaagaagaacaagggctgaattttgtactctcaagttgaatttaattccagcacttatagtggcaattgtagtggcagtataggcctttagtgacaattgtttaataagtgtaggtgctcttgtatgtgatttttagcacctatgtaaacttgtaaaaactgtagttggaaccttaattcttggcttaggtggcgtggaagtggatggagtttagtggccaagtgcaatgaaatgagtcatgtaatgcaatgccaaaaatgtgactcaatttgaattttaaacccatgtgcttttaaaattcaaattgtgccacataagcaaggcatggaacatgtgacttcacatgaagcacatgttccacgtggctaactcaaccatgagtcataacataaatagctttcacctcaagcttcatttcatttgccatttcattccacttgcatttagcttacattttttttagcttaggtagcttgcaacacaaactttaggatgtggctatataaggccaactcaaccgatttgtaaaaaaattttggcaacttaataagaaatctgaaatttcttgtgagagtttatctctttgttcttgtgcaagaactccttggatcttatcaatggcttctcaaagcttttgtggcaattcttcctagactcattttagagcttctccatggcgtcatccaccttcattccttgtctaattccaacctccattgcttaattctttggaccttcattcacgccactcttgctccaaatcttgagtaagagttttgagttcttgaagtttgagtttcattgcaaggtagattgggaaattcaatgtctaagaagtttaggcatacgccacctagcctttgttctcataccatttagagaaggggcgcaaaagaaggatagtgaaggctcagagaaaaatgcaggaggaacgacctagacaatattggtggggttgtggatgtgaaattagggaaggataaaggaaatgtgctaatgagggggttttctgtgaaggagttttaacattttttattggcgagtcctagctccttggcctgctgggaccaatgagaatctttaactggaactattgaggtttgggtaacatccatgaagttcctgttcttaaggacttaatgaaggttcaaaaacttagtgttaattcctttgtgagatgtttgttcaagctagcaagatggaggaaattcgtgtcaagctgggggttcgagaagggctttactgtggatagagatggtagaaatggagggcttgcactcttatggaaggaaggcattagaggataagttattagaatggagctaaaggaacatgggtctgtcttgcttttatggtatttcagataagactgacataaaggaattctgggagttgcttagatccttatttgctactttctcccactcgtggtgcaccataggagattacaatgacattctatcttaagaggataagtgtagcagcatggagcacccgcagtggctattgcggggtttccagcaagcgattcaagattgtgggtttcatgagattgatttggaagggtacccttatacatggattaagagcagaggcatagataggaccatgaaggaaaggttggattgggctatggcctcaagcgcttggttatgttagttccctaatgctaggcttttcaatttaatggtgcttatttctaatcattcctctttgtctttgcaacaaggttgaaactgctacagtgtacaagttttttttttttttttgaatgtgtggttctatgtttaaggtctagatgatattttgcagaataatcccaatgttgatgcgacttctaagctcaatagatctgcccaaaacatgcattcatggggaaggaagttgaaatcataatgaggatgataattaaagctacaagatggatatagaggctatgagggacaaaaaggataatcaattagttgttatttctaactatctgagagatatattaactgatgttggtaagaaaaaaaggctttttggaggcaacaattaaaagtgttatggttaaaagatggtgatcaaaacaccaactttttccactttattgcatcgactaagaggaaaaagaacaaggtggcgaggctcaacaaggttgactgtaaggaccctccctgtggcgcgagtggcgccaggtctcgcgctgatagcgccgggacctagcagcagaaaaccctgttaagggtgtggcgcggttagcgccagagctggcgcggatggcaccagactctctggaaagtggcgccaggggcgctagggtcgcgctggcagcgcgagcttctctggaggaccacgcctggagcgccagagttggcgctgggggagccaactgggtttggagtgcggcgcgaatcgcgtggggtttggcgcggatcgcgccacaggctcggcatgtccacgcggttggcgtggatgtggcgctgatggcgccacagttctgcagctggcgtggatggcgcggcatcccgcgcgaggtcggtgcagactagatataaaagggggtcgcgttttggaggagaagaaaatggttttcttcttcctcagacctccaacagccatgggacagcttcccaagctcccataaccctgccttgtgaccccaaacacttcctaaacccatcaaacctccttgaaatcttgagtgagcgagaatccttcctccatttcactaaaacctccatattctgaggaactccagagaagaggagagaacttgagtttggcaaggaacgacggctacccacggacacccaagcttggaggagtgttccagaggtcgtctgtgtcgccactgaggtaagaaactcgagattccttggttgtttatggattaagggttttgggtgaataatgacccatctgtgatagagctagaattagctctaggtccagttgagaaatgagtttagaatgatgagaggaggaaggattaactttcagattacgatttggtgaatgttggttttggctctaggctaagcatgtgtgacttggattgagtcacttgatttgagacatgcaagagccaaaatgatgggcttgtggtgcctaagaggccatggagacggtgtcttgtgatatggaccgtccaagccctgtggaaaccctgaggttttgggttgtttgaactctgagctccttgtgaatggctagctgtgagtctaggatgactctgaggccatggttgagctgagatagaccattgagggtctatggacaggcctgtgatagaggactgatgtgttgatttgagggggagctgaatgaagatcaagtgagattcaaccaaagttcaagacttggaagttttggctttcaacatggctcaagcaatgaagatgttgtttgtgatttaatgtaaaaggattgaaagcatcatgatgatccaagccttgatagcattcatgtatcatttaagcattgcatcatagagaagttaagtaattagtttaaaacttaagaaaaagctaagaaaacaacatatagtcgtaataatcgattactggcttattctaatcgattattttgttcttaagactcctggaaaactaaacatgaacactttaatcgattaccttatcggattaatcgattacacgcttttcagcatacttggaaattggccttgtgactgctttaatcgattaccatgatgttgtaatcgattatatgcttacttggaaaactcagtcactctgccttaatcgattaccaatggatgtaatcgattattcttcacaaacatgattatagcataggactgccttaatcgattaccaatagatgtaattgattatcattcataaacacgattttagcataggtctggtttaatcgattacaattaaatgtaatctattacacttcacattcagatttttgcccagactgatttaatcgattgcgcatcgggttaatcgattatttcacccgttagttgaaattctgatcctacattaatcattttaatcgattacaggagcgtggggagcgcatttaatcgattaaattagttacgatttcaactataaatatgaccctttgcctattgagcgaaaagaactaagagagatcaaaactaaagtaatttttgcgaattctgagtattttctaaaggcttctaagggttcactaaggcttcatctgggttattgagtcttgcttccattgatacattaatggatcactaaggttgctagtgaagcaagcttgttctgttacaaaggcttaggaaaggtttctgcatcattagtttacattcaacctgaagttttccattcataagtatttcaatcttggatcatcaggtgaattctttcctagctctttgtgggtgtttaattttctgcagtaaatttgtaatttgttgattatattgtaagtgggttttcttgcaagggagatagggtttctccatgttcaactgagtaggtttctcagtgtgggtttggcttctaaggatctaatagagttttagatctctgaacttcttctagggttgaagaagagaagcttgtaagtacttgtaagaaaaatatttgcaatagtggaactctactctagtgttgagtagaagaaactggatgtagcctcatagtgtttgaggtgaaccagtataaatcttgcatcttgatttaatttctgcagtctttattgattcttgttaaactctgtttttgtttgtctaaatttgaagcataacaagttttggattgatcttggataaagattttcatttggttttatgataaagatccaaagggcacttttaactctgattttgaacaaagaaatttcaatttcctatgattaaccaattcaccccccctcttggttaagtgtgagtgttccttattttccacatgatgaaccttaggtaggtgacctgagttgatagaaaggactaaggttcctttcttggtggcagttgatgactgctagatgagcttgttcatgtttatgtgcctgaatggtctgtaataggtgattgtacgccttggtagggcttgacaccgtgggtgtcagaggagcaaaccatcagttgaggttggagctacaagcacagttatcaggtaagctcatcgctctggggagtagtccctttctcttgtttgccacccaagtgggtgatgaatgcatgccatgcttgattatgtatatgtttatgtgcatgctaaagaaagaaaggccaatggggcctgttactgaatatatatgtgattgaagcctgaagggctagaggaacggtacttggggtgatactcagaccgttctagatatataaattggatgaaccctaggatagacaccgagatggtgagggtgttggcacctgtggtttcaggtgtaaggccttgggcctctggattgatttgctggaacctacaggatactggactggtatcgggttagttgaggttccctagccagaggaagagtttgagtactccctggaatagctgagattccatgggaggtgccactactctccgcctaaagtcctaagggtggattgcccagtatagatgttcctccttaggcaatgatgattaagtcctggagggttttcccaggcctgtatatgtgattaagtcctggagggttttcccaggccagtgtatgtgattaggtcctggagggttttcccaggacaatgctgtggaagtcctgggggattgagtgcctccgttgtgagatgatctctcccaggcagtggaaagtcccgagggattgagagctcccgatgtggattgtctctctcaggcaagtgattagagatcctgagggattgagagctccctgagtggatagtctctctcagatatctgactgacaagtcctgagggattgaaagctccctgtgtggattgtctctctcaagaagctgatgagtgtcctgggggattgagagctcccggtgtggattgtctctcccaggcagaggaaagtcctgtgggcttgagagctcccggtgtggatagtctctcacaggcagaggattggaagtcctgaggggttgagtgcctccggtgtgagatgatccctctcaggcattggactggaaagtcctgagagattgagtgcctcctgtgttagatgaactctctcaggcatgtgctgtgaaagtcctggaggtgattgcccatttatggatgttcttgcctaggcatgagttatggaagtcctggtgaggccaggcagtagatagatatgttgtatctctaagagagggcttcccgaggggatgagagcctagggcctcttagatgagccatatctggattctggaagtcctgagttgagagattcctcaggcaatgtgtgtgtgaagtcttgagtaggtgactcaggcaatgctggttcagtgatgaggcggtgcctctctgatatgagaagtgtcctagggtggacactatgttatggtaactctgtgagatgaatttcagatggctgtgagagccaagatgaggtggaatacctctgatgctgagagcatccagatagtacccagagagctggggaatgtgtgatagtcaggaggatgtcctaggctttgatatgtgtgtttatgtgttatgcttggggtgaaccagggtaagggaggatctcccagaaccctgagcttactgagacgtctgtctcaccctgtgtggggtttgtggtttttaggtacttctagaggagagaagttaccacagggcaggaggccctagctgagggtgctggagtggtcatgggctgcagatgaagattagaagagttttatattgatctctgtcttgtattttctgtataagtatagggtgtggatgtacacccattatctgtacatatttatgttggataaccacagaggtagtaaaactatgagttgtaggtatatgtacagattacgtgatgtatattagttatgtttcctcctgatatctattgttcaatttctgtgttttctgcctatgttgttttttgttatgataactggatcagcaggggcttgtgttgtgatgctttgtgttgtgtttttaaattccatgcataatgtaatcaagaaaaacgattctttgcttctgcaccgcatttatataatgctgatagtgcgcttatgatacattaatgataacacgtctggggtgttacattgactgacaattgaagattatttccaacaactctttatgagtaatgattgtcaaactaagttggtggtggattcggtccatagaaataacattaatatagtgttaattctaaagtgcaagttgcagacaaatatgggagatctaagaccaatttcactttacaacaagatctgcaagatcatctctaaagccaatgccaataaactgagaagagtgatattaaagtgcatagtggaggagcaatctatgcttatccatgggaggaatattctcgacaatattcttatttccaatgaggtgattcatcacatgtgctaagtggatatgatgttgaacttgacattagcaaagtgtatgattgggttcactgggagtttctcaagaatatgatgttgaagttaggatttgatgaagcctgggttaagtggataatgctttgtgtgtatgcacagtgagctacccaatggtgatcaatagcgatctagctagttctatttatcctaagagggagttgcatcagggtgattccttgtcactgtgtcttttatatcatttatgttgaaggtctttcctctattatcaagaaatatgaagctagggatgtttgtttttgtaacgacacgcctcgtcgttacgatatcataattctaaacatgtaatttcaattttaaatgaaaactccattaatttaattatgaaaatgagggtaaattttttgcgataatacactcaccagacaacgcacaaatgtgtaaattaaaaaattatatatcattcatatagaacataattcaatttttacatgtatttaagcttgggatttacatggctagtccaaaagaatcaatggaacaaactaagaaagaattgataacaaaatacaaatctcttacaaaataaattccaatgttaacatgtcagtttaacaactcaaacaaaaggatcttcctccaacatcacatactgctgctcatttactcccacgaataaaggtttgcgatcaccataggtgccaaccacatggtacaaaattgcaagggtgagtttattatacaagatcaagaaacaccagatgacaatgattaacaaaaaaacaataataataataataataatcacaatcattctcaataatccactagttcaatatactagtcatcaactttttgcacaattcaaatcaattatgctcagaatgatgcatgcacttgacttaactctcaaatacaatgtgataccatttgtcgggaaatagcctaagcgtttccacataacactctcacttaggaaaatgataactggttgaggtcaccctatcgtgcacaggcaactccccccatggtgatcagcctgagtttcaagggagttccaaattgagtgatatgtctccaagtaccagcatttttcctcatgaaaaaccacaggtacttactgccactgtttatactatttcaatgcaattatgaaatatgaaacatgggcaccatcaatgcattgatcgtggatagttaaaaattccaagcaatccctttccctctccagggatacttaaaattcttaaaccaatccccttccatttccatggatatccaacaagtcactgcacccccatgtatatacacaacatacatatcataaagacatcatcaacatcaacatcatctcatctcaatgtcatcatcatcatcaacatcaacatcatctcatattaatatcatcatcatcacaagcaatgacattccatatatatacatataacacatgcctaggattcacattccccaggtcttcagacaacacaaatttcatacatttacaatccataataccacgagactaatattttaggaaaattctaaattaaagaggagaactataatatacaaaacaaactcttatgcccatttaaaatttaataaaaaagtaaataggaaaacaaattgtaaaattttgggtagagtctcctctataattaagattttcccaaaatattccagtaagtacaacaacatcattcacagttttatcaatcaaacaaattcatcacatcctattagtttaaaacatagtttttcttgaaaaccaacatgcaacaaggacaaacgtacaaccctgtacttggtttctttgacctaaccatggtatcagaagctgtaaccaaacaataaactcccttcacctatctttatctctttgttagctcattgcaacatagtttttgagatctctcaggttcacgtcctttgatccaaacagagagttctatataccaaatcaaagataattcaatattgattttaaagacaaggttaatattaagattcggggtcaaatacccactcaaatttaaaagaggctaaaatggtgtttttggagtctacatcaaagagatgtcattttgaaattccaatcacgccaacatgatcggagttcagcaaaggtcacgaaaatgatatcaattttataaaaaggaaacttttacaatatctaattttcaaaaggcttttcaaatggaaggacaaaaacattcaataacggtacccaaatcacaagagatactaagagaaacttaaactaagtaggagaagacaagaaaatcatggttacctcgaagaaatcacaaaaagaggatttgaggcttcattttctacttaatccttgagttgagttttgaagattctgctctgattaaagtgttcatcttcgtgcgatggtccagcggcaagcaatgcaactcatggctgtcatcggtggccgtgagtggtggaggagaatggttagggattggatgagggttttggggaagaagaaaggtgaaaaatgcatttttttttgggtgatgatgaacatatttatagactatagatctcgcttagtgaacacgtctcgctaagcacaattttctctttgtctggaattgcgcttagtgtgctagtcgcagtaagaaagattccaaaagttgctattttaaaaaccccaatggtctaaacgtgtataattggattttgaacctacagtccaaattttaaggagatctaatggttaacaagtctaagattgtagttttaccaaaacaggtttgggtcaaacttgaaatctacattttcaacatagatcaaacaaactttctaaaagcatctttcttaggtaccttttgaccaagtagatgcacgaggtcttgatcaccatctcttaccagtgaaactcacacagccttgctctggattaacaaattacctttagactccaaagtgtttatcaatagttcaagttttctattaacactgtctctagtctcatcagtaagcacaatatcatctgtaaaaagaatacaccatgacacttcctcttgaatatcttttgttagttcattcattacgaaggcaaagagataacgactaagagccgaaccttggtatgcacctaccctaataggaaaataacttgatgttccattacaagctttcacacatgtggtagtcccatcatacatatccttgattgcatttacatactttaatggtaatattttcttctcaatagcccaccataaaacttttcttgggaccctacgtatgctttctcaagatccactactacaaatattacattttaagatgcccaatttaagacggttgtcgattaaccgttttaaaaggtggggtggtggcatttttgaaaataagaagaacttttcaaagacggttcacataataaccgtcttagatggctgaatacaatgacggttatcgtgtaaccgtcttcgttgtagtgttttcaaagacgggttaggtataaccgtcttaaaaatgttcaaaacatattcgaaacgcagtcgttttgccctcgtctccaaatatgtccgtagtacgaaattccccctaaaataaaaaatgaaaatcaaaggccctctatcgtgccctaaacccctgaagcctttcctctctcgtgccctaaacccctaaaggtgttgtcccctcctatcttgctttcgttctctgtctcttctgccctaaactcctcccttgaagtgtggaaaataaggaacacttcacacttaaccaagagggaggggtgaattggttagtcttggtaaattaaaatttctttgatgaaaataagagtttcaaattagagttttattgccctttggatctttatcacaaaacctaacaagaatctttatccaagattaatccaagacttgtaatgcctcaagaacaaacatacaaaacataaattcaaacaaaggataatcaaatctgcaaaatataaatcaagacacaagatttatactggttcacctcaaaacctatgaggctacatccagtttcttctactcaacattagagtagagttccactattgcaaatattattcttacaagtaattacaagcttctcttcatcaaccctagatgaagttcaaagatctaaaaccctattaaatccttagaagccacacccacactgagaacactactcagctgtccttggagaaaccctatctccacttgtaagaaaacccacttacaatagaagcacaaaatcaaagttacaacagaaaatctttacacccacaaagagctaggaaagaattcacctgatgatccaagaatgaaatgcatatgaatgaaaaaccttaggttgaatgcaaaccaattatgcagaagtcctttcctaaggatttgtgacagaacaagcttgcttcactaacaccttagtgacccatgaatgaatcaatggaagcaagactcaatgaacccaaaatattgcctttgtgaatccttagaaagctcaaaatatcgaaaagtttaagttcaatctcaatctctgttagttgttgatcacaagaggcaagggttcaatttatagtaattttcgtaacgaaattaatcgattaaaagcactccccacgctcctgtaatcgattaaaccgacctttggtatgctcaggagttcagtaaacgggtcaaataatcgattaacccgtcgcgtaatcgattaaaccagactgagcaaaaatttgtttatgtaaaataatcgattacggtctgcagtaatcgattaagccagacgtatgtacaaatgatgtttatgaaagatgatcgattacatccctttggtaatcgattaaaccagagcaggcataaatcaggatagtataatataatcgattacaatccttggtaatagattaagccagtgtgagtgcaaaacatgatttgaactaaataatcatttacagtcagtggtaatcgattaagccagagtgactgtattctgcaaacaagcatgtaatcgattacgacattatggtaatcgattaaagcagtcacaaggtcagatcctatgtatgctgagtttcatgtaatcgattaatccgataaggtaatcgattaaagagttcatgatgagttttccagaaagcatatgaacaaaataattgattctcttgggacagtaatcaattaatctgactatacactatttttccaaaaacacttagctttttcttaagttccaaaccaattacttagcttctatatgatgcaatgcttaaatgatatatgaatgatatgtatttaaagcttggatcatcaaaagatgctttcaatcctttttacattaaatcacaaacttcatcttcaaagcttgagtcatgttgaaagccaaaacatccaaggacttagcattacttgattcttcacttgatcatcatgcagctccccctcaaatcaacatgaagcgcctcagcttcgcctcgcttcgacctatgtgccgtcatctggatgagttgttctgcaattttcatatgagataaggtaaagtggtgattgatattttgtgataagtggtgatgcatgtgtggtggaggagggtattgggtggttgttttgtttgtctatcaaattgagactcgtccgggtcgcaatgttttgaaaattttatgctaaattagcacgagttacatgagttcttgtcacacaatggtatctaatgatggtagattactgttcactggcttttgtttcacatatatgacgtaagggatggactttagggaaatttcattcgtaatcccaatttacttgttaaccctcacccacctatatttgtgagatgtgattatttaaaatcatatgtgaatcttgtttttgcagtaattttgtctccactagtacatactcggaaggcagaactctattattgctctttacttatgtatttaccttttcagccattaaaaagatatcatgtttttgctttcttagttatgatttacttttaatttgatgagtatattttgtttactttgattgacggtttcatgttttaaaggtagttttaaatttctattttagaaattgcatatttgctattaatttgacctgtcagtgctactgtgaaataggtgtttgtttattctttaattttgattatttgattacttgcaaggaatacatcgattatttattattatataattcattaatttgtttactatcgtaaataatgtgtctgcattgctattgcattattcaatgttctttagctaacaaggttactaaaatagctttagttgtctaactctttctgccattaggaatattattcattttcaaactttttataagtatattctactggttcacaaaaccatctatgtctgttttggagtagagtattcctcttttaggttaattctatgtttaaaaagactttgattttagtcccttgtttttaacttgcatagtgaactgaacctagccactgtaaaaagcaattcctgtttgaaagaaagaaagttgttgtctaatgcctttctcttgactcttttatttatccactaaattagtttccccctttttttttttcattttttgtttttatttttgtcttctcaactttattatggaccctatgatcataattcacaagaattggcctaatagtgaagagtttgagtagtttgtatgaaatcttggtatgaactttataattgacattgtacacaaataaaaataccctatagtcataactaactagaattgtgttaataatgaggaatttcagtaggtttgtatgagatctcggttggaagttcagtattaacattgtacacaaataaaaggaccctatgataatcataacgttcggttggaattggtttcttaattgcagccagcaatcatgcatgttcaattatgtgtgatggggcttatttcttataacggcaaacaagaaagccatcacttctgaactcctttctttttctacagttttcaggaaaaagcatgccaactttttctcttctccaattccactatttatgtttgtccaactaacgaatcatagagaaattaattaaacattaaaaagataataaaaaatataacgaaaagtgttattctgttagggtgagtgagcagggctattctactctacaaaagaaagctttgcaatttgattaagacttgtctgatgagaattttgtccatcatttttgaaattagtggaagggggaagaaaaggaaagggataaatctagtgttttataaaaaaatgttgataagctcctctcgtgatggcaagtaatgagtccaaattctctttctgaatgaatctattttaacaaatagttgtttgtgtcagattctgtcactaagtcaaggaactaaaaaccatgtgtaggtattaaatgaacaggaggtggcttctgttcaaggttcaaacatattctttcttcagcaattttaaaacaaaacaaaactttgtgtgatagtgaaaaaattcctatttccttgtgactatttgctggtagtggcaccacataacactagtaattctatgattatattataccatttggccccttctattatatgatcacaatgcccccactgtgaaccaaccgaaagaccaactcaatcaatttttcaggccattcaacactggaaaatcccaggactagtcaaagttgctcttgctcaatgccaataattttttggaggcaaatgagtaagggaaccagtagagacaaattttttttggagtagagtattcctctactagaggaatacgcactatagtacattatgttttcggtcacttcaattttactaagttttcagtgttatgtttttttgtaaaatttcattgtgaattgcttatactagtatgataggcaaaacgggctcaagaagcgatataaattcctattcctatacttgacttttttcttcttttcactaatatgaatttttgttttaatgtagctgttcctttgtctatcgatcacaaacctgatagatctgatgaacgtcaaagttttgaacaggctgggggaatcataatttgggctggtaatttttttcctgtatgggtgtatgccatttttttggagttcatacttcataataaattgatgataaataaatttcttgcactgctgccggttgatccaggaacatggagagttggtggtgttctggctatttcccgtgcatttggagacaaacttcttaagttgtatgttgttgctgacccagaaattcaggttgccaaaattataaccttgatcacccacttggtatatctgtgttgttatatttgttatgcctgctaaattgctccttttttggtactgttatggcttaggaggaagaaattaacggagtcgattttattataattgctagtgatggcctctggaatgtcatatcaaataaggtgagactatcttagttgttaaagttggccctaaacaacatagatttctttttctttttctttgtctagatttttagtagcaacatgatcttgtgaacttttattatttataattttagtctcttgtttgaaagttttctgataatttttgttagtagctattcattgttttgcttactaaatgaatgatcttaaactccataccttttttattatttgtgaaatataaaaccattactcattaatttaatagccctttatatattcataatcacatgtttcatctgttgtcattttcacggtacttatctaaggtacatggatctatagtattattttttttattttgcatcaaaccttagttgtaaagaaaaaaaacctgtgatttaagagccttggttttctttctggctttctgtaagtgacaatcaaacccaagttttttagtattttcattttgagcaaaaatgatggtttgaagtttcagaatagttacatgatgaaccttttcctacatacccactccaattagctattcgtagaagcagccttcaagggcattacttcttttaagtgggatgaacaaggtatttttctattttttcacttattgggtgtcactcgcttaagagttgaagttgagtgagttttttggactttccctaaacaactaaatgtgcagcttagtttttgaactttccctaaataactaaatatgcaacgtagcatccagtcctttaaattttttacacagacaattttgatctggaacatcgaattgtaataatttaaacttgaccgtttgattttattagttatttttcagctctgaattctaacattatatgtccaaaacccagacgtctcaacatgtataacaaaaactataatgttccttagtcatatgccttttcgtagtccactttaaacacaagacagcttccattagagcttttagcctcatccaccacctcatttgctatgagtacaatatgtagtaagtgcctcccttcaataaaagcagattgtcgagggtcaatgatggaaggcataaccttttttaatctagtggataagattttagccacgatcttgtacacataaccaataagagaaataggcctatagtcatttagaccctgtgcagcatggcctttagtgattaaggctaaaaatgatgcatttccacccttagggaacactccattaacatgaaattcatccataaagcgtaggaattcagttgttagaacatcccagaattctttaataaatttgaagttaacactatctggtccaggacttttctcactaccataggcccacacagcttcgttcacctccacttcattaaaactagctaacagcagattgttgtctttctgttcaatagttctaaaggaaaccccatccagagtaggtcttgtccaatctggttcttcaaacctcttcttgaagaaggatcgaatttcaggtttgactctagatggttcctctatccagcaaccatccaccagcaccccattgataagattagctctgcgtctccagttcactaacatgtggaaaaacctggaattatagtccccttccttaatccatttggtcctagccttttgtcttaacagtgagccatttgagtgtgctgcagtccaaagatctatctaaacttgttttctcctgttcgtctcctcagcatttagttgtctatcatcaccgaggatgtcaagcttgttaagctcatcctctaaaagtttcatcttttgctggatattcccaaattgggatctgttccaagctttcagtttcaacttcagacctttaatcttctcctttaatacatacccctccatccagcaacctgatgtgagttccagcaatccaagaacttgaaaggctttgggccccaatctacgacaatataccttagcaagatagggcaatggtcagagtaatttctgtccaaaatgagctgagaagtgcctagccatttatcaatccattcaccagagactaaccctctatccagcctactcttggcagtgccattaggtctgtaccatgtgaacttatgcccagaacaaggtacatcctcaatctccaactcgacaatccattcattaaattctcgcacactcttaccatcttggggtctttgacatactaccatacggtccaaaggacttctgatattattgaagtcaccaataacacaccataacccctccatgttaggaaatcttagttgtttgattgcctcctataagttccttttcagggacatatcacatggtgaatatttattcacaattgagatctttgtaccatcagctacccatttcccttccaaaaacacaaagccttcacctaacaccttgcttgtgaggctaaaagcattttcggaccagatacataataatccaccagctctattagtttcttgtacaaattcccattggaccataggatcaccccacacattctggcacatctttttgtcaacaacttctcgtttggtctcctgaaagcataacatgtccaccctctcagcagctatcacttttctgattgttgtccatttaatcccccctcccaaccctctaatgttgtacgatatgatcttcatggatcacttactctgcttcccaacttctgcacttcagccaattgtctaaccttcatagctacaatagagtttaccaaatcatttgggttgcaacaactaagacccagtgtttatgctagttccaaatctctatctgcatctttcaaccattcatccacaataggagttgaagtagacgcgtaactatctgcacctttccctcaagcattcctagaagggttgccactaacataggattgtcagaatgataactctctgaatgatttgcctcatgctctacaacatctgttgtaccaacagggctcaaggatgagtgagccctttattttcctttgctgatattctgctcaggttggttatcagtaattatattgggcccgaaatcctgtttgcacccctttgacctcgaatataccttccattgagtacaatccattaaaactgtagctgactcaaacaaacttttattcttgcatgttaacaaatcagatgtaattgatttagttgaaattttgtccttctcagatgacgaagaagagggattaattttacttcttttcagaaaacgcttcatgattgaagcttgcttttgtaaactatgcttcttcttttttttttttttattcagcttctgctttctctttatgctgttgatccttttctgcctcatctaccaggttcttttgctgtttcttcttttcagaagatctctcatcatttcttgcctcatcttgtgacaattttaaatttgattcctgaaacaatcaagtagttaagggaaaaaactttaataataaaaagataaatctattttcaatttttcatcatatgaattaagtcagacaattaaattaaactatatatatacaaactattgtaatattccatttgatcatatgtaaaacatgattgcactgccaatgaggacaacaacaaggaagaagcaacttcagctataaaaaacacataactgaatcaaaacagcagcccttacattgaacagtgtttctctttgcagttcattttgtatgctttctttcgctttctctttttcagcctctttgctatttctctccaactgcttaattagcaatttattttcttcggttgctcctttcttgtccctacaattatattttaggaaaacaaatcaacgcacaaaattttatatttgagacaacatcaaaacatgtcaggactgtttttaagtacatgtcttcaccgtttttctgcaacaagccatccactaacaagcggatatctgcctcaggaaaagctttattgagctttgctgatgccttaattaatccatcattgtaatctggttcagtctcttggtttttagagctgctatcgtttctgaaaaacaaaccaattttatcaaatactcattaaacaagcaaacatccccatttcctaaacatgatcaaataaaaaattaattaagggccaaatacaatgaaacactacaataagtgtcactgatagaactcgcaaacagagaattagaagggaaacaggattacttgtattatgacagcaattcagaggatgtctttgattgttgtaggaaattacaagtaatatgggtaaaaaacaatataacaatgtaattggcaaagcagtagacagttcccaacccaaccctgtcccaatacaagcctccaaaagcataaagtcatgctacctcccctatatacactcttctctctccaaatcagcgaatcaactgcaatcattaacttctgccagtgtggcagaagttagttgcctcctattgcaggcctcagcagcagcagtagcgccccaccccccacgtttccatttcccacgttcataaaccttagggaaattcctagtttgtcctttattaactaggtctgtatcaacaccccctctttcaaaattcaccttgtcctcaaggtgaagttcaggaaagctttccatcatcttcttcaatgattcccaataattttcacatgttggcaaattcttcgatttcaccagcagttccaaactattcacattctgacccttaatagctaggatttcttctggataattctgcagttctaaatcctcactaacaaaggctggtaaaggtagaacagttgttctagcaaatactgtgggcttcagcaggggcatgaaacactggatgcacccggctatcctcaggtagtgttagcttgtaagctacctctccaatcttctctatgatctcatatggtccatagtaccttggactcagtttctagttcaatctgttggccaatttcttgagtttgtagggttgaatcttcaaataaaccatatctcctaccttgaactcaatgtctctcctatgagcatcagcatgttgtttcattctgttttgggtttggctcaagttttccttcggaaccctcaataattcattcctgtcttgtgtcatctgagtcacttcctttagagatgtctttggaacatcacccctcacgatagagggaggatccctaccatataaggctctgaatggtgtcatttttgtggctgagtgatagtttgtgttgtaccagaatttagcccagctcaaccacttataccactgcttgggctttgtgccagtcatgcaccatagataggtctctaaacatctattcacaacctctgtttgaacatcagtttgaggatggtaagcagagctgaatttcagtttggtccctgctagcttgaacaattcagtccaaaaggaactaataaagatcttgtctctatcagagactatagattttggaaaaccatgtagttttactacttctctaaggaaggcctctgttaattccttagcagtgtaagggtgagctaatgctatgaaatgagcatatttagtgaactgtccaccactactagaatagtatctaggccccctgccttgggtaagcttcctatgaaatccatggtgatatccgtccaaatctgttttcgaataggcagtggttgcaacagcccacctggactaagtgattgatatttgttcctctggcacacctcacacttctgcacgtattcttgaatcctcttcttcattccttcccagtaaaacatggcagcaatcctcttataggttctgaaataaccagaatgtcccccaagtgcagtatgatggaataccttcatgattaaccccactttggaagaagccttagggacaaccaacctgtattcatagtagagtatgccattcttcatcctgtagcccttgtgctcactgcccttgatgaccaattcttgaattaatcccttcaatttctcatccttgtcaatttcttcttcaaggtcaacccaattaagatataccacaatcctccttttcaggacttacatgaacctctgaatacaagtttgtcaacaaaaattgacatttaaatgcacttccaataagccccaccactattgtaaatataaccatagaacaggtccacacttaatcattataaataaaaaagaatcaaaactcaccagcacttccacccctattatcaaacatttgaatgctgacaaagcaattcaaaaacaaaacgaactctccattaaaaacagtaaaataaactaccataaaccttggggaatcttcaaataacttcacagcagcaaccaatattttaagaaaatgaaagaataaaaaaaataatcaacaaatgctgaagcaatgaacacatatttgaaaattttcaacaaatcattgtgtatgctgaaacaaaattatcaacatatatagtaagacagacatgttttgactcaaaaaataaagtcaggcacatggtcaatcattggtttacttgaatgttataatgcagaggccatcataatgaaaatgactgcgcagtgatttcccttttaccttattttgttatattaaacactatgcttgatacttaattgttgtatgacagagtgttgttaccttatttcaataccatgtctgttgaaagtctttctgaaaaccttggtcctagcacgtgcaacatgttcccttatagacaataacaacgcactcacatttgctgttattcataaatcatgtgtctttaatgtttgccatgaattttcgtctaagacctaatttttttaatattaataatttaaatttctatatacatatgtctaacatagtattaattaattgttggttgttgttttaggtggtttttttggctcagttagcacctaaaggcgtcttttaacttattattggttcacgaaacaaaaaatcgttgttatggtcgccctcactggattgtgctcttctatttattgaccatattttgaggtatgtcccttcttccatatgttatgtgttaacaacttgctttgttcattcttgactattgctttgtcacaccatgcaatgcattgttagtcaaccttagtttcctgttcaagaatcaattcaatgagtaatacggatagtttggattattcgttgaattgaaccttgaattgtccggttggacagtttgggaagttatatcttgtatacatgatttgtaaatacaagtaaagtatggtttgtttaatttaatgcaaattcggtgtaactgcacattgctttgatctccgggtgtatacttgattgtggtgaattcaaatcaccgctttcatttcgtgtacttggagaccaatgcgaaatgctgccgaaatttcattaaattaaataaaacacacttaacttgaatttacaaatcaagtatacaagatataacttcctgaatgggataggtccccaccttattaatgttaacatatacattttcatgcatataacatttacaatatcatcatcgcagctttttttaaaaacatggatcgtaactggatgaaatcaccgcgcattagtgaccaatatgaaaatggggttgaacaattcctctaatttaccacacataatgcaacttctttgcatggaaattatttttgtccttgtattaagtgtggaaatgggagatgacagtcgctcaatgatatccgatcacatctaatatgtcacggcatcattttgagttacacaaaatggatctggcacggtgaactgctggatatgccaatagttgaaaccactgcgccgtgtgacatcgacacaggacatcatatagaagacatgctacgcgatcttggagaagccaactttcggcaagcacatgcacctacatattaaaaattacaaagtgattcaaagatccctttgtattctgagtgcacaactttcacacgattgtccgcggtgttagctttggttaacttaaaggcaagatttgggtggagtgacaaaaactttaccgagttgctagttttgttgaagaagatgcttcctgaagacaacactttgcctaaaaatcattacgaggcaaagaaaattttatgccctatgggtatgcagtaccagaagatacatgcttgccctaatgattgtgtattgtaccgaaatgaccttgctgatctggaaaactgtccgacttgtggggtatcaagatacaaagtgaacgaagatgaatgtactgatgaatccggcagaaacagttctcgtccagcgaaagtctgttggtatcttccaattattcctaggtttaagcgattgtttgctaatgctgatgatgcaaaaaaccttacatggcatgctcatcgaaggcaacgtgatgaatttcttcgacatccggctgattctccccaatgggcgaaaatagatcagaagtacccaacatttgcaaatgacccaaggaacttaaggcttggccttgcatcagacggaatgaatccttttggtaaccttgccactaatcacagttcttggccagtgttgttgatgatttacaacctccctccttggttgtgcataaagcggaaatacattatgttgtgtatgatgatagtggttccaaaacagccaagaaatggcattgacgtttatcttgcaccattgattgaagatttgaataaattatgggttgatggggtggatgtttatgatggaaatctgaaggaaacctttaccttacgtgcaatggtattttgtaccattaacgactttccagcatatgggaatttgagtgggtatagtgtcaaaggccattatgcatgtcctatatgtgagaaacagacgtcattcatccaactaaaacatgggaagaatacagtttacacaaggcatcgaagattcctcaaactttatcacccatataggcgattgaaaaaagctttttatggaagtcaagagacacaaattgcccctacaccgttgattggccatgaagtttatgaccgtgtgaaggacattgtgaatgtgtacgggaagacccaacagagggatgctaacgaaagacacatttggaagaaaaaataatattttttgatcttctatactggtctgatcttgatgtaagacattgtatagatgtcatgcatgttgagaaaaatgtatgtgatagtatagttggcacccttctaaacattaaaggcaagacaaaggataatttaaaaagtcgccaagatcttgttgacatgggtatacgccaacagttgtatccaattagtaaaggtcaacaatcctatttgcccccagcaagtcacactttgtcaagaaatgagaaaaaatctttttgtcaatgtttgcgtagtgtgaaggtcccacaaggatactcttcaaatatcaagagccttgtttccatcaataacctaaaattggtgggtttgaagtctcacgattgtcatgtgttaatgcaacaactattgcctattgcaattcggggtatattgccagacaaagttagggttgccatcactcgcctgtgcttcatgtttaatgctttatgtaagaaggtcattgaccacacagttggatgatttagagaatgaggcagctattgtactttgtcagttggaaatgtttttcccccccctcattttttgacataatggtccacttaattgttcatctagtgagggaaatcaggttgtgtggttcggtgtttttacgctggatgtatccaattgagcggtacatgaaggtcttaaaaggttatactaagaatcaataccgaccagaagcttccattgttgaaaggtatgttgccgaagaatgcattgagttttgttctgagtacatggattcagttaaacctgttggcatacctgaaagtcgtcatgaccaatcaaggagaggaaagggtacacgaggattcaatgttgtaactatgagtcgacaggaggtttcacaacctcatttgtatgttttgaataacaccactaaggtaatgccgtacttctaagctcacaaacaacatgtggccaatactcaccccaaaatgaatatcatgaaggtgttgcaagaacataacaaaactttcatgtcctggtttaaggaaaaaatctttagtgaggacaatgcttcttcaactttaagactgtttgctcttgggccaaacttaaatgtacccatttggaagggatatgatatcaaccactattctttttacactaagtcacaagatgataaaagcactgtgcaaaatagtggggttactgttgacgctgactcgttacacttttctcgtgcatatgataccaacccaattcaagcgtccatgccatactttggagtaattgaagaaatatggaagcttgattatagtgcatttagagttccagttttcaagtgtaagtgggtaagcggtaacactggtgtccatcaagatcatcttgggtttacattggttgaacttgataaagtgggttacaaggatgagctgttcatcatggcagagcaagagaaacaggtgttttacatcaaagatccgtgtgacgatcgtttttcaattgtttaacaaggaagaccatctactgatgatgcatcaatggatatgtgtgaaatggcttgtttctcaacacggatgccctccatagttgaagacaatgacgttgatgatgaacatgcaaatcgggttgatcatgatgaagggttgatcatgatgacgttgacgttgctgactttgaaagtaaagtatttttaatattaaatgttgttctaatgcttcgacttacctttaatattaacatgttttaataattttatgttatatacatgacttatgtgattttgttgtttcattttacttgtagagtgatgtcgacacctccactatcccctcccaatgcacaacataatctttcagatccaacgtctaggaaaagtagaaaatcgtctcggctaaggttgactcctagagacttggatcagccaaggtcaacagtgaacgtaaatccttccattggaagagcatcaggcaataacaaagaaaatttccacagctatcttggagtagtggctagagacaaaattcctatagtccattctttatggaatgacgttccagaaacgttgaagaacctcatttgggaagacatcatggtatattaacttggtcaatgtttatgacaaagttcagttctatgttatcatatattgaattggcaaattcttaagtattgttcaccattgtagggaaattttgatatcccagaagcagaaaaggcaaagaagaagatttgtcattggtttgcgcaagatggaggtcattcaagtcttcgttgaccacaagatacatatatactgaagctgaaagccaaaatgataatgatcctttagttacatatggtatacatcctcaaacttgggagcaatttgttgctagccgaaaatcaccaaaatggcaggttagatggaaatatatgttttactttaaataaattattcaaatgacttgttttttaaggtcgtcaatcaactacaattcaaaaatgtgatagggaataaggaaaaaggcttaggaaatccaaaaaaataacgaatgcccccacatactttctcgtgggggttatgacttgctagaaaaaaagctaatggatgaaaaattaaagaagcaaggacaagatgcaatgaatactgagaattcgttaaatttggacgaccctccatctccaattgctagacatgtaaagtgtaagatggcctgtacaaagaaatatggacagatgacatctaacactgcgaatgaaatttttgataaaattgtgagttgaatcaacatcattactattattattttatgtgaattcaacgttaatttgtagcttttatgttgtaggacttgttagaagaacaaatgacacaaggaaggtttattcctcatggtcaacatgacatattaaatgctgctattggacgaccggagcaccctggtagggttcgtgttgcagggacaggtgtgaccataactcaatactttggacacagttcacatgcctcaagtagtacgtcgggatccatcaatcctgagcagttggctggtataattaaagaccttaaggaagaatggaggagagaagtggaggacgaaagcaaacaaagaatagaaaaaatgaaagttgaattggaggagaaaatgaatgaaaaaatgataaatgatatggaggaaaaattgacacaaaaattgaaggaagcaataaaaacggagttaacccaaatggcaacacaaaaatcccccccggttgacgcacttttacaagaattggcagctcgtgttagcacgaagggaagtggtgttgaaactacagtcaatccatcaagggaagaaaatgtagttgttgaggtgccacagatggggttgtttgttcgttctcatgggtcgacaaagctagttgctttgggaaaagtttactgtggaagctcctcaattcataatgtcccctacgcagatgatgttgtacgggtcactgttgagaaaatatatgacggggatgctcttgttccattttcgacatcagagataacgtatgtcaaagagaccctacacacatttgtcgcttggcccaaacatttggttaaacccgtatcccagaaggtatatatgcatttaatgtttgttttttttataaatctattaagtaacaattggttattttttattcgtgtgaatcacataggatgcacacactagctcagaaaaaaaaagttaaagctgttaatttgcatataaattgcaagcagttgatcctttggatgaattgatgaagaatgcatatgaagtttaccataggcctatacagttgtcgtgggaggggtttaaatttggaattgctgctgtagaaacatcattcttcatcacacattcagatattaatgaaattatatctggtgacaaatatttgaacatttctatactacagctgtggattatgtaagtaaaaggcctatacaatgtctcagttcatgtcctatttatttgtagttgttacaatgtttatatttaacaatttcaatttcacttaaaatgttaattataggtttctagatgaatggagtacaagcttgggttatagttcagtgtatgggttcttcgagcctcaaatgatacataatgcaaaggatagacgttctgaatgtcaacaatacatttaaatatgggtcaaagaatcacaaagataggtgtacttaggagcttatttgaataagtaagtaggaaactaatgtggtttaaggagtaattgtacttttttatattaagttgctaatatatatgaagtgcagtgcacattggcagcttttcgttgtttgtccttcgacgcacacagttgtgcggttttattcattgcgtaagaagccagacattcacatcaaagcagtacttaacaagtaagttgtataaaaaatatatatttttacattatgaactgattttatgcatacaagataaacctcatgtgttaaccaagacgtgtgttgcatttggtaaattagtgtacttaaggccttgaataccgatgttgatggtaaatgcaatgtaggtgcaccaaactggattgaaatgaaggttagacattgagttgaccttcatataacttgtgttgcattttgtatctggaattgtgaaatttacatttcaatgtttaaaaatttagagccatgtgctaaatggaggttttgaatgtgggtattacgtaatgcattggatgtggaacatagtaagtgggggtttgaagaatgagtggaccaaggtataccaagtgcaatgtttagtttaatttgttaaatggttaatgacttttaatgtattggaataatttgtattttgacttattgttgcagtggttcagtgatggcacatcgttagacgtggacaacataacaacattaaggaaaaaatgggcatcgtttttgttagaatcaaaaaacaaatcatagtgatgttgtcttgtatggtgaacggtgttgtttaaaatattcctccttgttatttattataaactagtagacaaatgatactttttggttgtgtaccttttgtacttggattttagtatgcttttgtgcttcatggtgctgtatcatggattgatgaagctgtatgtattgtaagtcatacttgaacactcagaatgaacgtgtcagtttgactactttgtttctgcgtaactattcattagcctttccttcttccttgacccaacaatagctagtttcctcaatagctagtagtaacataatttacttgtataaatgcttaaagaagcatctatttttgtgacaattttaactgaaccttagaacccaatgcagtagacattgcagctgaaaacactttaaattcctgatgaggatacctaacgaaggaaactattcgctttgttccaaaccattagcaacacttcatgctagtttacaatttgtgatatttaatgcacttccattaacctttcagatcatatagtacctgccatgactgctttgaattggctgaagaaaaaggtcattacagttgacgatacggctggtgcggccaaggtaagtgtagaactattgaaagctatttaggtggtattaggtgtttctgttgattaatggtcattcttaaattttattgatacaatatttacatctagtcatgatcattggaaccgcacccactttttttattttgagaaacatgcttcttccctttacatttcatagcattttatatatttagtttatgtaagtaggccatccttggtcagtttctgatttgcttggtaaattagcatattcttatcatcttctaaaagacatgattaaatattgcaccttgggttataggttgaaattcaattttgactgctactgtttacttgtttataagtatcactcaacctaacatagttacaaattatagcatgtcgcctaccagaaactacaagatgcaggagcagttgatagttctgctgcggcaaagatgtatggcttgaatatacttgatcaagacattcaggttctggatccatgttgtcagtgtttacttgtgtggttgacagttcttgttcatggtagatttgctcactaatgggtttacattgctcctatctagtcgagaaagaacatactacaaaggaaattgctacttatggattttacattgctcctatctggtttataacagaggtgaggaagttaagattgatatctcaattttgtagttaggcagaaccaaagcatgcataggtttgatgtttagtctgttatatagtattgttattttattgattcatttttctgttgttttcagtatctatcaaatgctacccttgcacgaacaagtgttgcaagtacaacaatattgtcatctacttcaggactcttcactctcttcattggtgtgtttatgggccaagacactttaaatgtatcaaaagtagttgttgtcttagtcagcatggttggggttgtgatgacaactctggggaaaacatgggctgcagatgacacgctatcaagtgcttcgtaagcctttcctattgctttttaaaaaatccccttcattatgcctttttttccctttccattttaactgataacaaaattaaagcattaggtagtagtagatggtcctttttcatcctatactctctaagctggttaacaaactggcatttccacattccaaattgcttatgccacttaattataaaatggaaacaaaatgattggatatggtcttatttattcagttgccaattacacaaagttgccaccagagtgttgattatgttgaccatattgaccttggttacctcttctaagctttattgataccattgacagcagttttcgtgaaaaaaaaattaatggaaataaatgtcaaaattgattaagtttacatagttttgtactaggggtataaatccaggctgttcagaggagagagcctccactataaattggtgtcctgtgtctcacacctagataatataggatttcacaattcacactcgtgtttccccattgagtgtgaactgcggttcatctgcactctcctggatttacaaaactgagctgtcataccaatttgatgcataggaaagaaaaaggaaataaagaagtattatttttcggttagaaacatttgaaatctgaaaatgtcttatgctgctggttgagtacaaaattttgaaagctattgataaaaggttaattatatattgctaaacccactacaaatgaaagtataaatgatagaacactatgatagaccatcacagtctcattcactttccattatattggtggagaccaacgggatcagaaaagctgtgcaaaacttagctcattattttagtcatggtgcaaagtattaaggagtcattttgttgtctttcatatattatcagctgcttgctctttgtaatactattttttgggcattgacagttgatatttgtgttcagcaatggacaacactctcttgttggagatctttttggccttctcttggccatgtcatatggtctatttataggttagacaatgtcttagctttttgtttgttttttgactttgtcagataatttagaagaataatgacagcttctttaacgttaatgcctcacagtgcttcttaagaaaatttttggtgaagaaggagaacgggttgatgtgcaaaagctgtttggatatgttggattgtttacacttgtagcactatggtggcttagtaagtttttaactaacaatgattctatagactatagttctaaatgttaaattataaggttctatgagtccaatcctttttatgtgctcatttaacttggttcttgtgttcaaaactgattgctaattctcttgtatccttttctcagtttggccattgcagccttaggaattgaatcaaagtttacaattctccattcagccagagtggacgaagtggttattgccaacggatttgttggtagtgttctctcagactacttctggtgcagttgctgtcctgacacctgatatgcccgatgtcctatgccatgtttctgtacgagcaagaaatagcaaggtatcatgctttggatagctaggctattttgcttatatgcaaggctactattattaaattgtggacctgtttgtatcttgtttaatttggcacttgatcagtgtatccatagtcaaataacgtgctcagactctttaactataatgacattttagtctatgctccatctctaaattaacatacttcaacaacaatgatatcctataagttataataaattcttttgttatattgaaaacaattcagctatcttccacaatgaaagttttaatggttaaaaattgatggaggctgcgttatttttttgctggacctggctcaaaattttgtagaaaggatttcaaatcccctttcactattggtctagtaatattagcgagagcttttgtatacaggggaatgtagtccattttttggtgttgttgagggcctagcctaaagccagatctttggtgtactacttactaggttaatgggggtattctaattgcatgagccagttactagacttggtgaggagaagaatggggagtctgaatgctgtaagcagagaatttcttatctatagggtcttaggctctgggtagtcagagttcactttctctctaatcctttcttatttcagcaatattatccatcttttctctttttgtgccttaggtttctaccagaattgatatgaagttcaaatttagacttgccaactaagcagacttcattgaaagacttgacaggcttcatcagctaacctgttaccaaacgtgatatccattaatccaagacataaattataaaatagtaatcatattttatcttgtggttttttaatcaagcccgatgatgtgttggccatgtagccaacttcatcttgtgggataaggctattatgttgtatcatatttatcatgccgatgagatttcatatgcaatgactgtcaaatgttgaagttttgagttttccatgccaggtgtgttttgctacatgctttgatcccaatatcttggctaacctccaagaaaataaaggaaagcttttgttcttgaaccaacatctgctgatgtagtttataggtaacattatttctgctttagattaaagttctaaagatttttaaatgcctttctgctaaaatattcaattcatcttttgctgcccaaactatatttctgtgttttatatcctttcttatactatttgtctttatctcttggcatttgttacagtgaagtcaaggaaggtgactttattgatgacaaatcaactcaattcaaagatgttggttttgtgtcacccatatctttggctagaaagaagtttagtggtacatatgttgtctcatctgaagaattcactggtgaaatggttaggtttcaaaattcactgttaacttggacatttatagttgtttatccttatgactgtctttccacccaccaaaatgcacaacatgtgttagtatacatatgcacaggtttcctttagcataacttggataaggttgtgttttcccaggatggagctaaatgtaatatctcttatttaaaagggaaagtagcttcctggattggaattcctacctcagttgccataccatttggattttcgaacatgttctttctgataaaacaaaccaggttcaatatgtcatactaggtcaccatatgttttcatgttgcataacgaactgtgcagcttgtattttgtcgctttcaatttgtgtagattttccatgtctatcaagtagtgaaatcttttaacttatgagaattgtgattttgaatacacacacatatgtaaaatggcagcagttggttcaattgcaaaatttttgtgtttgttttccttgtttaaaaataaagcatatacgaattgaaaaaatcaaatatagaaaaaaaaaaaaaaacaaacaaagacggttgtgtctacaaccgtcttagaaagaaattattaaaaaaaatttactacagattctaagacggttacaaagtaacccgtcttagaagaccgaaacatactaaaacggttgcagcagaaaccgtcttaaaaagcactttaaataaaaaaataaaacagcttctaagacagttgttttctttaaccgtcttagaaagcgtacaaactaagacggttatttggaataaccgtcttagtttgtacccattctaagatagttacaacaaacaaccgtcctagaagctgttttatttttatttttttctaaaagcaccttctaagacagtccgacaactgtcttcgtaagctagactttctacatcgcgcgatactaggacggttcaagaaccgtctttaaaggcctattttacccgtcgtaaaaaccgtgctttgtagtagtgatctatgaacaccatatgtatgtctttcttattttctcaatacatttccattaattttcgcatcaataaaatgcgtttcatggtacatcttcttgacataaatccaaattgatttacaaaagccttggtctctctcctcaagtgattttcaataactccctcctataacttcatagtatgactcataagcttaatgcctctatagttagaacaattctagatatctccctttttatgtaaataggcacaagcatacatttcctctaagcattagacatcttatttatttgaagaatcttattaaaaagattggtcagccattttatttccacatccataggcctcttcaaacttcaatagggacgtcattgagtccccaaaaatctgctaactccctctggccaaaacatttgctaactccttctccacacaatatacattttccttatggcaaaaatatctactaattcatcaatttacttgttaaggttcctatattccatcttcccaattgcatcttaaaccgctgacctacttgtcatcgaatcctggtgaaaacctagcccctttccttgaggcaaggaccctagctagtgttactacatcctgggaccgatgcagtgccttgccttgtgacaagggccctagcccatttgttacgacactcggtgcccaatgtaatgcgtcgctatgaagggtacacctcaacgaaatatcataatggttcatctcataaaaatagttgttttttacagctggttcccaacacttgatgccaaccctccttctttatcagttgtcaacttaactgatataaaatgttgtatttttaaaattagttgtttgacaacagatgtaaaaaactcaatttggaaaaagcttgaggagcttgagtatgtccttttacattgacaaccgatttaaaaaaatacaatgttttacatcagttttgtcaacaaccaatgcaaaagtaccatttttcatcaaataattaatcgatatgatagaaagggtataatgtttcattttaaacaattgattgaccaaagtgaatcttttaataattgagggaccaaattgaagcttaaaatataatgaagggaccaattgtataattaaacaagatatttctataaatgacccacctcccaaattcagatagtaaaactattattaaaaaaaccataaattttttaaatattaaacaaatatttaaactaaaacttatgtaaaaacaacatgagtggtgtttaaagtcatagacattgtatcgacttcttcctatttttgtcaattactttttgaaagttgtatattgacttacaattaatttatgttgaagtcatgacttgttcttttatagttttttcaatatttggtagtagggttgttaattacggattttttaaaaatagattttgtttaaaaaaaaattgttgtgatgtaatttttaagttattttttaaaatggtgatttctttttgtttatgatattatgaattattgtttgtgctgtgttttttttagtccctaaaacttgaaaatacttttttagtccctaaaattttcaaattgtattttttggtcattctagcaaatgacgttaagtacgttggtgacgtgacagacaaaatcctagttagctattgctatgtgtattaagtggagtgaggtatttttttataaaaaattgtatcataatagacaaaaccctaaattgaattctcgagtttttccaaaagtaacaaacaatgttaggcttttctcaatgtgcgaatgatgtagttggtcagttcaaatggcgtttgcgtgggtctgaacaacatttcaaggcatttggacggtgtgagaacgactttaggtgataatcgaacaacgtttatgcggtagaaggtattagtcgaatattccatttttgaggttcaacaacatttcataagaggatatcggagttttatttgctaaattgggtttttaaagtatgctttgcaatttaaaggggttttattggaattgggtttttcaattgttatttatgtattcctatctaaatccactttgttttcttcaatcacaaaacgtctacatttctacagtccactttgtttccttccactattgtctcacctgttatgtgtagatgaatgttttttctacacaaagacattgcctccctttcctcgatgaaaatgaatatagtcccgcaaaagaacaagatgcataatgtaacaccctaaaatttcgataactgaaaatagatgtttgatgtaattgttgtgattgcttgattatttgattaatttagattgtttgagctgtgttgaattgtgtgattccgagtttgaccgaaatctgttttagtaaaatcatcattttggattggttaaccgttggatcgccttcaaattttaaaggtaggttcctaagacacatacgtaactttgaccgttgagattgactaaataacatcttaaatgtgagaaattaatttttcacaaaagcataaattttaaaatttggtcaactcgcctaggcgaattttggctcgcctgggcgagtcaagtcagttataaatagtaccagcaacataaatgatgaaaaaatggccttcttcctctcccaaatcaccacccaacctcccaccatcatcctccaccagccacgaccactggtgaccgccacgagtcatcgtttcttgccgttgaaccaccacacggagatgaacactttaattggagcggaatcttcaaaactcaacccgaggatttggtagagaacgaagcctccaatcctcctttcttggtttctttgaagtaaccatggtttccttgtcttctcttagctagtttgaagtctctcttgatatctattgtgattctggtaccattattggctatttttatacttcctttgaaaaccctttgaaaatgagatgttgtaaaagtctcctttttatgaagttgatgtcatttctgtgatctttgttgagccccggtcacattggtgtgattggaatttcaaagggaggtgaacacaaaaaataaaaaaaaaagtatgattcttattatatgttgtagtaccatataatcataatcattattatcaaattacctctgcttgattgaaataggattcagcataatcgatatgcctgtaccccacctgaattatcagtgatcacatacaatagccagccaactattctacatacaataaaattgtttacaataattcagataatctaaaccaaggacaatctaaaatgaaatctatgaaaatattataataaaaaaagaaccgacccataaattagaaaataaaaattcagttccactataccttgatggcagtggtgacaatagcatgatcaacgctaaacgtgcctaatccaatcgaaggtatcttggttcttgtgttcgattcaaaagaaataattgcatttgtcatttttctggaaacaattacaagctcaacttagagagtcgagtttcaacagaaatttttgatgaacaagtaaataaaggagctcatggaaaaaattaggatggagcatgttggttttataaagataagaacgctttgtataaagacaaaagctattagttgatatgtgtgcatatgtcatgagtctggggactgatgattagactatagtagttgttgcattattgtcactagagtcatcaatacaggttccaaacccgtgggccaaaatttataaaaattgtaattaattgagaaaatggatatgttccgtttatgatcctgttcatccaaacatgtggtgggtcgggttaattcacccaactcatctaaaaaataatttaatattatttcaagacttttagtattttgcaatattattttaagacatcaaagtttaaaattctacacttcagttttatttatttaatgttttatttaagactattttattctagattcttttgtaaacataaaatgcttgtcatttaaaaaacaattattatagttttagcttgtcataatgtcttgttataggtatgatgtgtggataatggtgagtttaacttaactaatatttttctaatttattcaaatttatttttctaaaaatattaattttctattgaattttcttttttaaaaaatattttttttttatatttaaggtggattggtgggccaacttgtggtgggttgggcaaggccaatattttaaagattcaaccttaagtaagccagattgggttggtccatttataggatgggttgaggcgggccgaacccaacaaggcgagcttacccgttttgacagccctaattgtcagtctcctagggacctacttgtttaaggtttcttattttatattcatttctattttttgcctctcaaaataaagttggtcaattaaatgacaattttctatgtcgttttctctctcttgtgtgagacgtgtcattttctctcccttttgtgagacatttcttatctcgattagggtttttgtctgtgtcatttgcgtagaggtctttgttgcaatggagagtgtatttctcttccgattgcataaccaaatattaacaaagacttatagggactgacctaggagatgatgagggtgaggggctgcatttaatctggaggagaaggtggagagttggcagacgtgagtctctattttgtgggtcgtttcgctacgaagaagcctatttaatcccaaataacgatggataggttggctactttatggaggtcgataaagggtatgtctataaccaaggtggattagggtttgtttatgttatagttttatcacaagatcgattttgacaagatcttcaaaaaagggccatgtttttcaacaacaacttgctggttatgggtacgatcaaaccaagggaagcatcgaaccagatgcctctgttctttaccctattctgagtccaagtctatgttgtacctaaggttttatgactcctgtggtgggcaaatccttagggaatttatatgtgaatttgtagaatacgacaaaacaacaacaaaaggggtggcatcgatacatgagaatcaaggttaatgttgatgtcaggtgatggggtgtgagattggggagctgatttaagagttgatctgacaaggaaggaagggattgaaggtgggaaatggcttaaggaaggatctgaagggaggggtgataaggagaatagggagaaaaagaagacaaatagtggggggagtgtgcaggagggtggagaaacgaaacacacaggagaaccatcacagttggatcttgtgaccaatagtgaaggcgttgggggaaaactttttcaaatagggaactccctagcttttgttctcatactaattagagatagggcgtagaagaaggacaatgaaggctcagagaaaaatgcaagaggaatgacctagaaaatattggtggggtttgggatgtgaaattggggaaggataaaagagatgtgctaatgaagggggttttctatgaaggagtttcaacatttttaattggcaggccttggctcccaggctttccaggaccaatgaaaatccataactggaattgttgaggtttgggtaacctccatgaagttcctgttcttaaggacctgatgaaggttcaaaaacctagtgttctattcctttgtgagatgttggttcaagctagcaaggtagaggaatttcatgtcaagttggggttcgagaagggctttaccatggatagagatggtagaagtggagggcttgcactcctgtggaaagtagggcattaatggaggagttatcatcatatagctaaaggaacatgtgtttgtcttgcttttatggtatttcatataagactaagataaaggaattctaggagctggttaggtactaatttgctgctttctcccactcgtgatgtgccataggagattacaatgacattctatcttaagaggataagttcagcagcatggagcaatggctattgtggggtttccggcaagcgattcaggattatggattacatgagattgagttggaagggtacctttatacttggattaagagtagatgcatagatagggcaatgaaggaaaggttggattgggctatggcctcatgcttttggttatcttggttcattgatgctaggattttcgatttatgaattggctatcttggttatctttgcaacgaccttgaaactgctacggtgtacaagcattttttttagaatgtggttctatgtgcaaggtctagatgatattgtaaagaataattgatgcttaatcccaatgttgattatgcttctaagctcaatagatgtgcccataaaatgcattcatggggaagggagttgaagtcatgatatgaggacgataattaaagctacaagatggatatagaggctatgagggactaaaaggataatcaatcagttgttattttaaactctctaagagatagattaattgatgttggtaagaaaaaatgtttgttggaggcaacaattgaaggtgttatggttaaaagatggccatcgaaacaccaaatttttctactatactacatcgactaagaggaaaaagaacaaggtggcgaggctcaacaaggttggcagatctgttgttgtttctcatatagagattgaggaatctgttgaagtttatttctaacaactctttatgagtaatgattgtcaaaataagtaagtggtggattcggtccatagaagtaacactaatatagtgttaattctgaagtgcaagctgcagacagatatgggagatgtaagacccatttcactttgcaacgtgatctaaaagatcctcactaaagccctttctaataggctgagaatagtgatagtaaagtgcacagtggaggagtagtctacgcatatccatgggaggaatattctttataatgttcttatttcaaatgaggtgatccatcacatgcgctatgaaatgcaagggaataagggtgtggtagcattgaagttttccattagcaaaatttatgattgggttcattgggagtttctcaagaatatgatgttgaagttaggatttgatgaagcctgggttaagtggataatgctttatgtgtgtgcacagtgagctacccaatggtgatcaatagcgatctagctggtcttatttttcctaacagggagttgtgtcaaagtgatcccttgtcaccgtgtcttttatatcatttgcgctggaggtctatcctccattatcaagaaatatgaagctagggatgtttgttttcggggagctccaatcatctctcacctccactttgtggacaattgtttccttttctttcaaatttaaccaacgagagcaagaaattaaagatcatccttgaggagtatgagcaaggttctagaaaggctctagatttgcaaaaattaaaaacatttttttgccggaatgtaagcgaaagcacgaagtatggagttcagaatgtgttagggcttatagagggaaatatgaagggcaaatacctcaggttaccttcaaacatagggaggaataaaaaataggattcaaatttgttaaagaggatgtggaggaagcttaatgattggcgaagtcaggcattgtccatagctaggaaggaagtcatgcttaaatctgtagctcaggttatgcccaattattgtatgatcacttacctctttcccatttctatggttgacgagctccaaaagatgcttaattattttttgtggggggttaggtgtcaagaccatagaggattacactagatgtcatgggagaagttggatgttaagaaggaaagtggtggaatgatgttcaaaaaattgtttggatttaacctcgctcgagaagcaaaggtggaatttaatgtctaactcaaatgctatggttgcttggatcttcaaggccaaatgctatcctagggggaaatttttagatgaggatgtgggtcaatatctgtcatattcatggtgtaactccaggattgtgcaaaaggaaggccaaaggtggataatgggtgatgggacctcaattaatgtgtggaggaaatcatgggtgagaggagagggtagtgaaaggttccttgcggatgatatatctggtagtaagaagatgacaatcaaagatttgacaacagatgacgcagggagtgggatgctttgcgagtaaacttgatttttagccttttagatacttagaaaattgtgaaggccccctcccttttttgaggcagtggaaggggatgaaagaatatggcctcatgagaaaaatgggagttattcagttagaaagtgcttgtaagctattttgctcacatgttagtggtgagagtaatctccacgttcaaaaggattatgatagaatttggaggttgaaggtaccattgagagtcaaattgatgatatggaagctgtgtagaaatgtcttagtcacagatttgcctatgggagaaaagggtttattgcccttccttttgcttcttgtgcaatgcgagtttggagaatgttagccacttattatttggttgtaccaaatcgcatgaatgctagataaagttgggagtggtgattgagtatttttagtttaatatttttctattcttcttagcttatttgacttctcttggacttttatttttccatttctaattcaatttttgccttaggcaaacaagtgggcttaattgataattattgcttattttcagatttttgcttacttgacttgtcttccttgtgtaggacctatagagctctacagaactccaaatggtgcatatgagtagtccctggaaagataaggaaaacatctacaattttgtcagagataagccaaagccaattctatcattttgagggtcattttaggcttggaagtcagaatcactgcacttgaattttgggctacgaattggtgtaattagtaattagttagattagatgagcctaatcacgatccatccttttctactgactcagtcactatacatttgtaattagttagtggattttacacacttcattttagcacaaacatattttgtagtgacttttagaagtttttcagaattaaaaccctttctattattttctctcaactgttcttcattttcatctatgttcttccattttcttgcactaatttcgtggggcttccaatgatgatgatcatggaatgctaaacaatcaatcaatccaagggtccagcccaagcaaggagcatttgagttctggtttggtacttcaatttttgtatgaatgtttactatcttcttcaatcctctatttgattttgatgattatgaatgtgtttaggattgaaaatggattaggttatggattcatttcctaattttgaattttaatcatagattatttggatgatatttcaattaggtttgtggtttcaattaatttaagggttaattcgattgaactgcttctaatgaaattaaatgaactttcataacaagatcattatttgagaactatgataattcacattgcttggtttggtgaattggattgatgttctttaatctgttttacattacctttaatcaattctgttagtttcttcaattgtagtttttatttttgcaatttttgtttatcgcatgcaaactgttcgacaaaaatccccctattatttactagtgaattgaagttggaaccatattgattgtgtctctaagttgacctaggttaatcctgtgctatagtactagcgtagtttaattgttttgaagtgatacgacctcgattattaagtggacaatattgttatgcctttgcgtttgtcatgccattgggcatatgatatttgctttcaagctccatctcttatgaaggggaatcagcaagctaactttgctgctactttatagagcatatggagagccataaaatccaagccgtgggagaacaaggcatttatttggaagtagttaaggaacatggctcaccacttcatttaggtctagaatagagctacaggatttgaagctaagctggtcggtttaagaacttagcaacaacatgttcatcagtcggtccctccttctggttttctgaaatgcaattctgatgctacattgggccaaggggataacaaggtgcaatagagggtctattgccacaatgattctagtgcatttattctagccaaaatgtagtgggtgagtttggcatgtatgtgctagaagttgaagctttgggggtggtcaaagctatgcattggttggctgtacatagcttcacctaggttatttttgaaatatagtaagacttttgtagataacatcaattcttctactgtggatagattagaactaggtgttattacccttcaatgtaaaaacctattagtgcaaacccatactatagaattcattttgtaggaggcaagcaaatggtgttgctcaatctcttgctagggtggcaaagtcttatgccaggctcaagattttccaacacattgctatagtttttttttcccgataaatgttagttgctagtttgttaacttttgttagctcgagagttggactccacaacctctccttcctcccttccccctccactaccaagccaaccttatatctctactatagcttattttctattttttaacaattaaaaacacatcgagtcagtgataatcaattgtgcttagaaataatctattatcatacattgtcaagccattactattcaaacaaccgattatcatggtaaaatataatcacttaagaacaagaattatcaattattttctaagagaaatatgatcattgttcatttttgcaaaattgaacaaagaaataaaaggatgtgggactcacatttctttctttcttcctccatctatttcacaccctatttcctatctctcctatattttcaatcattcttttttatttatcctctatttttgttctaacatatggagcatacaatactttccgtttatgtggaaaatgcatgcctcatatgctcacacctctcacaaccacaatctgttgattcagatgaagccaagcatcaatgaacaaagatcaagcttcaaggttttgtgctttcaacatgctcaaaggaaaagttccaaagaaagcttgaagaccaatttgattaatgtaaaagggagtttatgatctaataatccaattgagcatatcatgcatgaatcattcatctaggattgttaggattaaatgattaagtaaaagcaatttattagaaaggcacttaagaagcaaagtttttggaaaaaataaagctgcattattaataatcgattacaaggccaatagcatcgattattttgttcttcgtgccctttagaaaacaaatcatgatcattgtaatcgattacatatcggattaatcgattacttaggctttttatgaaagattgaactctctgtcttaatcgattacatgctattacatgcttacttgaaaaaatcacagttctctgtcttaatcgattacacatcgtgataatcgattacaaagtattacatgcatgcttgaagaatcatatctcactgtcttaatcgattacacatcgtaataatcgattacaaagctcatttagaaatatatgactgactggtttaatcgattacttcacggaataatcgattatattgttcatagcttaaacccagaactcattaggagcattttaatcgattacagtcttggattaatcgattacaaatgagaaataatcgattacagaagcgggtttaatcgattattttcaattagaaagctgttataaatagaactcactattctgaagtttgtaacttttgataattcgtattctgggctttcacaaaccttcatgagctttcattagtgagttttctgagttactaaacacataggcttcacaaattcatatgattgattgattgattgattcaagagtgtgaagcatcattgatcatcaaaagcataaggaaaggaatgtattgagttagtaatctgtcattcaacctggtgaattattcatgtgcatgaattcttggattatcaggtgatagcttccttattctttgaaggtgtaaaattgttctttgaatttctgtaaagattagcttattgtcaatgggtttcttgcaaggatagagatagtgtttctctaaggacagctgagtagtgttctcagtgtgggttttggtctctaagggtctaatagagttttagacttcagaactttatctaaggttgataaagagagacttgtatttgcttgtaagaatatttttgcaatagtggaactctactctagtgttgagtggaagaactggatgtagcttcatagtgtttgaagtgaaccagtataaaatctgtgactaatctttcttctcacctattcatctcttaattattttgtttgtgaatcaatttcattgcacagaaagttatactctattttctattcttcttgaaaaaaggaatttgattgaatattgattcttggttttgaaacaatttttaaagtgataaagatcttgtggtgaaactctaatttgaaattttaaattaccaaggttcaaccaattcacccccctcttggttgatttgaagtattccttttgtttttcacaatcaatgtataacaacacatttttcacatgtgtgatgtgtttggtatgaggaaaagaaattggtgaaaaatatgatagatagatataaggaagacgaaaatagagtacatttagaggtgtttaatttaagagaaattgagaagaaatggagaagagaaaaatagagtaataaaaaaaactctttaattgattttttattcacacaatccattgtgcttaaaattattttttatacattgcaacgggttttaaatcatcgatattttcgcagtgatgtaagatcttgttatattcacatgtgaaaacaatttatttgctggaagaactcatgttcaattctcatcgtgtgtaaaatttccttggactagtgacaaccatgcatgacaaacaagattagtctttgatcaagtggattaaaaaaaatactcgtgatctttgacccataatgatagagtgcttttagttgagtatttttctatccttgttagcttatttgacctctcttgaacctttattttcctattctaattcagttttgggccttggcaagtaagtgggcttaattgctaattgttgcgtatttttggatttttgctcacttgacgtatctaacttgtgcaggacctagagggtgctaccgatctccgaatggagcattctaggagtccctggaaagataacaaaaagatctacaagtttgatagaaatagcccgaggccaattctgtcatttagagggtcattttaagctttgaagttagcgcctctgcacttgtaattttgagttgcgaatttgactttcatggttgtaaatagcaaataattagattgttgggcttgtttgtggcccattttattttcagaactcaatcactaatatatgtagtgactttagtgaaacttggacagcacacttacaattcaataaacaacttttacattccttttctttagtttttagaatcaaaagctcattcttcattttctctcatttgttcttcattgttcttcatcttctttattttcatcttgctatccttccaattttctgcactcatttcatggggctttccttggtgatcatcatggaaggctaaatcactaatcaatccaaggatctaactcaagcaagagaagaattagagttccggtttggtatttcgaattctacttgaatgttcaccttcttcaatttctattatgttttcatgattatgaatgcatttaggattgaaagtgaattaggattatggattcatgtcttaatttcaaatgataatcacaagattaattgaatgatagttcagttagggttgtggtttcaattaatttaggagtaggatcgattgaactgcttctattgagattgaatgaaagttcatgttagaatcaatttatgggaatgatgatgattcaaatatcttgagttagtgaattggattgatgctttctaatctgttttactttactccttgataatcttgttaatttttgcattgttctttaattttcgtttgtgttctttcatgttttactttacacataccaactgtttgacaaaatccccccttattattaccaatgatttgaagttagaaccatattgatcgtgtctctgagtcgacctaggttagttctgtgctacagaattagcttagtaaaattgtttttgatgcgtctcgacaacgtgtttatcacataacaaaaaaaaatatcaattttttccttaaaaaatcaatattttagaaatccataagctaaaattgtgacgattttaaaattttagtaaaaaataaaacaccaataaatatgtaatttatgagaattttaaaccctttaaaaaatactcttgcaaactaatggtatctcgttaccgttttcacatatttcaacatagaaattaaaaaaaaatgaatcctctattactttttctttccctcctctatcttttctctttaaccaaacatattgtgtcatttcttatgtgtcatttttttcatatctctccatcctatttcttcaccatttaccttcaacaaacatatctgtctaatttctctcctaaattttcttctcctccaaacttttatgcaagcataccaatctcatgttcaatcatgatcatcgaagcttaattactttgtattgaatagactaccatagtgaatttctaacctactacacatttagaataaagttcgtttggtcaattcgaaaaatatgaaatctagaaaaataagaccaggttccttggttatcaagttttgaatcttccacatactttacatgtgacatcactgtatgtaaccaggtcgtatttattttttatttaatttaagataaaaaataggaaaaaaattaaaaaagaaagtaagatgtaacatcccaatttttcatgtgtgtgtggtagacattgttattattttgttatgcgataaggtagtatttttagactattgaaatggtaaaaaaattatatgttaccataggataccaaggcgtgattaaacccttaaatttttaagcctaagtctaaaagaataaggataattcaaaaaaaattctttggtcaaataatggtcaacttattaatgacctagatgttaataattagattttggtatagaaacagaaattagaagcttgaaagaaaattagtaattagtgtaagtaaacttagaaattaatggggaataattaaggttgattaatggtgatttagattccatacaattaaaaaaggggtaattaagttataagagtttaaagtggagggcattttcgtaaatgactatataactagtttagaaaccgaattttagtttaattagttggtgactaattaaagtgtctaattatatgatgtagaataattaaaataagttagagttataatgccctgaaaaattataactcagattgacagaggaaaccctgcgttatgtcatttgtgcatgtatgaatttaatttcagtatttatatgtttttaatcatataatttcgtgctatatatatatataaatacaaattgtctgaactagattttcatctatgtaagaattgcactgtgcattgagtcacagtgtaatttgtctctgtgtgagtggaatttgtgcatggttcactttgagtgcacatatcctaagggaggttagcacactaatatagaagtttaggataagatttaccaattttagcgaaacaatttttaccatttttggcaaaactctactttacccttttgtagttagttttagaaaagttcaagaagccatataaggcatggctgagctcatggagagcacctcaagggttgtccaagctgccaattagtcatattaataccaagccttgtcaatggaagcatacaccatagcttattggcctttgtgaataaaaattcttttggagccttatcccttcattttgtaagaaattaaacttgagggagtggagttcagttgtgcttcttcttcttcctaactggttctttgtgttcttgagcccttgagtcaccaagtttaggtaaatgagcttcattcttcatcttagactttattccttttcattctcttgtacttgtttatctaataacttggaactgtcatttggttttactaatgaagggaaactttgaagaacctgaatattcttcattgtccttcaagatttcgtgatttcttcaggaggtaaggggggtctttgcaactcctgaaccatatgcttgttgttgaatttcattgaacatgttgttgcttcgaaattttcgagcttgctgtcatgtcctgaatctgtgtgctgagttgttttacttgagttttttacgccaaaaatgagttctttgcatgttaaatcatagatttagcctaaaatttcacccaaatcgtagttttctaccaaaagttacaaataaaacaagtttaaggacatttagtaaaataaaaaatctatcataaatttggactagagttacagtactatgaattaactttattaaagttttgatctcaaaaatgaattttttaggtttgaaaatgtagggtagcatataagatttctgaaaatccaactcccgaagcaccgagagcactaaaaataagttaagagcaaaactttgaaaaatcaagtgacagagtgattttagatagtagatagcttaactttggaattcatgcctctatataaattatcttagaattatttatttttaggaaccactaatttattttctattgtatggttgtaatatctataagatctgatgattgatgcatgttttaaaattgtgatgattctctattgataaaattactgaaatgtgtgcatgtattttattgttatgataattgaatcataaggctgatgaagtgtaaactccatcaattatacttgtggtatacaaatttactttctataatatatatatatatatatacatatatataccttcatattgtcattttttttatctatacacgtggtttaggtttgggggtgttcaaaccttgacaaattatttgttatggttttttagatagctataattatagccattattttatctaattattttttgtgacaagtggctttactgcttaatgggccacaaatggtttcctgagagtagtacgcaggcctgagcctggtctctctttcttgtgtgtttgtttgtacgcgtccatttttgcatgcggcacgagggctatgcagcaatgtagcagcaatagtcaagatgattggaaagagattaaggaaccgttggttctattttcttctgtgagaaggtgaggttacattgaggaagtggatgatgaacaaagatacactaaggtatagtgggtggagaggtttgacgaacctagaagaattagcgagtggtgactacctgacatttggtgcactcatttagcaagtggtgactattcggtctatcaactgacactacttactactcctaactggcttcgagagtatgctttttaagtatgaagatgagtggtcaatgtataatgtatttctatgtagtgatcgctcctgaccatcatctacatgattttctaaaatcatcaagacctgggaggattggtggcagtgattgggccctgtattgaaataagtgtgacagttatgcacttaggatgcaagagtgttgtttgtcaagataagcacacacagcggttacgtagattgtatgttttaattttattttactattgttgttgtttgtggcattcgaagagcggaggactcacccctacaaccaataacttttagatactaatgatactgagtgcatcgaggcgtctgcaggctcagtgtagctcgcaaagagagcaagtatggccatgcaccgtaacacatactacacgttacacctgccatacttgagtccaagtagtgccagctgatagactagatacaacgtgcatcgagtacacctagtgaaggttacagaggatcaatgtgaccattaagacatgtcatctaaagagatggaggagtaccgagaactactgagatagttagaaccgacatctaaggaggagagtgatgattctttcgaggaaacttcatagttagttttgtacttctagcatgataagtagtctgctatggtcctagttactttattattttgttgtattttgagagatattttttttttccacatacatgtattttgttgaagtagggatgaaaatgtattgtttattatcacactattatgggttgtatccgtatatttcattatgacattacaagttttattttatttatgtatgaaaactgaatttactctacatttgcattttattttaattcgatgcaaccatttagcattttccaactattgcattttgttttaaaaataaatagtataggaagatgtttttattatttataagaagcggtaaaaaaaagagcgacacgtattctgaaaatatattaattaatgtattttcaagcaatattttcagtttaaaatttgaggtgttacataagatgattctcatgaaaatcaagtaattttttctttatttcactcttctcttccttgaaccaaacatattattaagtttcaaaaatgacaccaaaaacatttttctacatataccgaaaggttgacttgggtgattaaaaattatataataaaaatgttgaattgaatgtagcagagaatgctcgtgtaaacccacgtcactccccggacacgtgtttaagaccaacgcatatgaaatacaattttctttttatcaataattatatgttagttgttattttttaggtttaataatataattgatccttaattatattttaaaatttaatttgattatttagttataaaaaagtttaatttgatctctcaattgtttgaaatgaaataataatatccattctgtaatattcattaactatttgacgaaaaacagtactttttacatcagttgtcaacctcaacatcacctttgtaacaccccgtaggcctccggcgcgttatcattatgatatcagttagcgcttaaaacattcatttaaaacttagcggaatcacaggattgattttttcctgattcattatgtatggaaacccagcatatcacaaacacacacacatacaaaaccatatcatacccctgctgatccagtttatctcatacaatacatatatagacagattgcttattcagataggtagataactgaaaaacatccaatataagctcaggagaatcatataatatacatcaatagttctgttcatcaaaatatacataagccctcatagggggtatacagaactatacacgtcatagggtacatacaccccatccctatcaagggaacaaaacagaaacaaagtcaaaaagagctcgcagctctctgtgctgtatcccattcagcagcatgtcacctctagggcctcctgtcctgcatctgttcttctctcccagaagaatcacctgtaatcataagccccacacggggtgagatacacatctcagtaagctcagggtccttggaggactttcctccaccctggcccacttccataacacatacattaggcatacatacaaatggctcaccagcctagcatatcaggtcctcatcataacatattaagcatccaaacaagtcaagcaatggcgtatcatcatcaacgccaggatacatcatcatcagcatccatcctcagtgtgagaccggaaactcacacccatgtcatcccattgggtgctacccttcgcatagatgcacgtataaggtacctccaagaatagcaggaatcgtcatctactattcccttggtctaggggatcatcatcaccccgggatcatcatcacccatgagccaaccatactaggaggaaaccatctcctaaggaggtccatatctatccgttggccaacagatctaatcataattataacacagattctcaagcacagatgcataatcatatcatcatgaggatgcaactaccactgcatgcagcatggaaatgaccaccactcccccggagtgtggtatgcaacccagatgggaaataatccccagggacactgaacttacctggtaagggatcactctgcagttccttcccaggtctgtggctcccgccaccaatagtctcagaatcaaagcctaatcaaggcatatgcaaatctcatatcaaaataagccctcaggcatacaattcacagtacataacataacagaattcccctatcctagggttcagtcacactcagccccacacaaggctgttcacagaccattcaaggtccctcaaggctgaatgccaagcctctaagtcatctggactcaaaacacaacatacatggcatagtttcctcagccttaacctcaattatcactagaacggactgagttccactcaaagtctcgttcaactagccacttggcttagcacaacacaatcaaggctctagcctatcagagaactatcaacaagtgactctacacaagtcacacaggcatatacagagccaagattcaaagtcatcagaatcaaaaattgaaagctaatccttcatctatacctcgctctaaacaagtttctctacaggactctgggctaattctagccccagctaatatggttcactattcataaaaccccccaggatcaaaattaaacgaagaaacttgagtctcttacctcagggatgactcaaaagacctaaggacagcttccttaagctctagcgtcctttatatgtcgtgggtcttcgccaatctcaagttctctgaggtttctcccttgagaattcacttctcacccaaaatggggtttcaagagcatgaaatgaaggattaaagctctcaaatggtttctaataagatcaagggtcatcaagaagtgtttaggctagtatataaggtccctaaaagcttgggagggtcttcaatggaggtggaagacagaaggaagaagaaaacactttttccctctcctttttcgcgttttggaccttaaatacccggcctgaccgacattgtcgcgctcctggcgccactatggcgctgatggcgccaacatccagtgtatatggcgccactttggcgctcttggcgccaacttccagcacctgtggcgctcttggcgccactctggcgctcttggcgccaatttgcagcacctgtggggctcttggcgccactctggcactcttggcgccagactccgtcgctaacttctgtcgcgaaattcgtcactaaggcttttgcgacagaatttataatttaaattcttatttcttttacacctttttataaaatgcctaggttattataacctttaactcaagataattagggtcagtggtagatgaaaccaatgataaatatgaggaggttaaaaaaagtggaaggtgaaagggaaataagataaaagaaaaaaaaaggaaagaatgaggggggatgaagaggaaaatgactaaaaatggaccatctaaaacatagagataacaacgggtctaactctccatcaagcttatagcttttctccattatcctaagacacaccatccgccaatatatatctcactctattaagtcttgtttaactaccttttaccaggtaagtttcgatctacatctacctctctttatgttaagctcttaataacgagcttttgttcttacgggagcatctaaggattgtttcattacttgtccaaaccacctcaatctatattctctcatcttttcactcaccgatactattgctacctttcatcaaatatcatcattttttattttcccatcttcgtataaccacacatccgccaaaacatcctcatttatgtacccctattttatgctcatgttacctatgtgctagccaacattcaacttcatataacaattcaggtcttacaattgttctatataatttgccttttagcttaagggaattttgcgatcacacaaaaatccagatgcactccaccatttcatccaccctgctataattctatgatttacatcctcatcaatctctccacctttttgtaaaattgatctcaggtatctaaaagtatctttcttaggtacctcttaaccaagtagatgcatgagatcttgtcaccatctcttaccagtgaaaactcaaacttcatatactaagtcttgctctggcttaacgtgaatcctttagactcctaagtgcttctctacagttcatgttttctattaacactgtctttggtctcatcagtaagcacaatatcatctgcaaaacgtatacactacgacacttcctcttgaatatattttgttagttcattcatcactaaggcaaagagataaggattaagagccgaaccttggtgtacacctaccgtgataggaaaataacttgatgtacacatatggtagccccatgatacatatccttgattgcatttacataccttaatggtacttttttcttctcaagagcccactataaaaaaattttgggaccctatcatatgctttcataagatctataaacaccatatgtaagtctttcttcttttctcgatacatttccattaattgtcccatcaagaaaatggatttcatgatacaccttcctgacataaatccaacttgatttatagaaaccttggtctctctcctctaatggaaaactcattttagcttatggagaagtttatttcattttcttcttcttattttcttcttttagagaagcttacatccaaataagtcttaaggagaatacgatgaaactgcagatatttcattcattaattgattattgataaatacatacatatatatataagtgatctcaatcatattgattgaatgtttggagcagggctatgttgtacttaaccaatgttggattaatgacatacttatgtggctcatgtcatcatctatatggtatgcctgggaaaattgaaatttacacgcatcatattggacatgttgtagggcaaaagaatctaaataatattttttttattaaatatttatgaaaaaggggctgtttgaataatatttataaaaatggggcagtgtaacatgcctaatccaagcatgttacagctgtcccatttctataaatatgccccccctcagcatttccctcatattttgccttgcagtcttctgtgtctttgctaaactgcctaccattctagtgtattttcatttttttcagagatttttgaagttgttttgagtgacgagaagcatgagttcaagtggtaattctattcgcgttatcttatattgtaatggaagaaaatatcaaggccaacagggtgtcatttttgaaggggaaacacgagcaacctctgtgaggcgtacctcaacacttagtgaattgcatgagaagatatgacaaaaattacgtctaaatagcaaccagtgtatcactttactgacgggaagattatggcaacacgagaagttcatggggtttcaaataatggatgatgaagacgtggagttggtactggatgaattttgcaaccagggaaggaaagatttttcggagttgtacgtggatattgcacaagttgaggatgttgttttacccatccaggcagttccacatcatacttcatcatatgctgctggaggggcatcatttgttggcggagaggtaaacgtgtctgaggaggattcacatgacctaacttgggtcatggatgatgatgaaaaggatgacgatgatgaaaatatcgcaatggaagatcggcttcttgaggaggatgctagtgcgtcgaatgacgatgaggatgctggtgtgcatcaagaagatgttaatgtcgggccatctgaaagtcgtgatcatgcggagggtggttctagtcaaccagaacaaggtaaattagctgaggatgtgaattacaatgttttgtcatttaatttgttttatattgtttattaatatgtttttgaatgtgcgtgagatgatgttattttgttagttaagtttgttgactagatgaattaggatgatagaattttgttttgtatagtaaattgtttaggtatatgatgtttaaccgaaagtgtttgggtttagggcttgggtggggtttagggtttgggtattctggtgaggggttagggttgtgtcggcaggcgtacattgtgtttagggtttgaatggtttggttggggtttagggctttgtggtgagtttagggtttggttggggtttagggattggttggggtttagggtttggctggggtttagggtttggctagggtttagggtttggctgaggtctagggattggttggggtttagggtttgggtgttcgggtgaggggttaggggttagggttgtgtcggctggcatacatggtgtttggggtttagggctttgtgttgagtttagggtttggttgggatgtagggtttggtttagggtttagggtttggctgggtttagggttgtctctgcaggcgtacatggtgtttaggattagggtttaagttgatttctttttagttactttttagataaatacttataaacgttaagtcattcattttttggtaagaatttgtgttgctagtgctttgtagttgatatcgttaattaaactgacgttgaatgtgcaactgctggggcgattcctttctggcaaggaattcctcattatacatatattgatcagagttacccacccgaacaagactcttttagcggttcgggttcgggttcgggttcgggttcaggatcagtgcagggtccatggcaactaggggatgatttgtttgttaagcaataatttgactccaaaaaggaagcgaaaatagcagtgaagcataacttgatgaaggagcatcaagaagtaactgtggttgagagcaagcctgacaagttttccatgaagtgtgttgcacatactgatggttgcccttggagggttagggttattaaatcagttttctgtgagaagtgggttatttcaaaatggggtggaaaacacaattgcttgaatgatcatatttcacagggtcacagacagcttgattctgacataattgctgactggttgttggtatgttttaattcactgtgatgcatttcaaaaacatatttgttttcaaagcatgttgttgatgtgattgttacttttgtttattttaggaatgattaaggaggaaccatcagtgtcaatctcattggttcagaagaggattaccaacacatatggatttaaagtttcttatcgaaaggcctggtatgcgaagcagaaagcaatggcaatggtttatggggactgggtagaatcttatgcattcttgcccaggtggtgtaactacatgcttcgttttgcaccaggttcttattttgatattcagacgagtgattacttcattgcaaatcgactgatacgggcaaagcgcgtgttttatcgcattttttggacttttggatagtgttgcgaggcatttaactattgcaaacccatcattcaagttgataggactcatttatatgacaaatataaaggaaaattgttggttaccacaactcaggatgagaataatgaatgtgtgcctttggcatttgccattgttgagggggagacgctggaagcttggaattacttcctttataacattcgcttccacgttactcgcatgcaaaatatatgcctcatttcagatcgccaccgcagcattatatctgctgttcaaagtcatcctggttggcaaccaccttttgcgcatcatgtgttttgcctgcgtcacattgtcagtaattttaatcaaagattcaaggatgcaagactgaagaaggccctcatgaatttaggtgactcaaagcgttgatatttatcatacttttggtttagaaaaatttgtaaagagaattatgttgattgtaacaccccgtgtgcacccggtgtattaacattgttattatattagaatagcgcaacaaacatatttatagctcaataatggaagcttaaaccaaaataaatatacattatatacatatatggtgagtttttgtcatttagaacatacttttctcaaaactgtacaaatacaggcataacaaaaagaaatgtgagccaacatgcttagtcatctatgcctagggttctatccatagctatcccgactcaggcctcttgccttgggatctatctgctactcctgaaacatcacttgcaacaagagccccaacaggggtgagataataatctcagtaaactcagggttcttggaggtttccctccccctggttcacttccaagcacatatgcacataattaatatcaaataaacatcaatcatacaatcagccttcacggctcacatataaaacccccacatgcatagcacaatgtcaggtaaccacatatatacctaccacacctagtctgagagagatcatccattaaagggcactttctctcaagacttctaattgagtacctgaggagatcatctactgaaaggcacattcactcaggactttccctatccatgcctgaggaagatcatctaactagaggcacattccctcaggactttttcccgcccatacctgataaagatcatccaatgaagggcacattctctcaggatttacatggacgcctatggattttcccaaggaagatcatcctttaagggcacattcccaaggggtccatagttccctattctactggccagagaattcttatataatcacatcacacaacattatcataacattcatcaaaataatcaatacaaagcctaacattatcacaatgtttggctaacatcatttaccaacatgccataatggcatttctctcaacatcacatgcatgtctcaatataacaacatacaatattcaaatgcatggtataccaaaccatcaccctcttgggaatggtgaagcaaaagcaagggaaacattccccaagaacgatgagcttacctggtctcagctcaatatcggctctcccggcctcgtggtgaccactaacagcactatgaatctcacgccctacattaggcatgctgataaaccatcagtaacggttttcaaccgctcatatgaaaggaaacactcctctctcccatattaacctctatgtcttctaacttaaagtttatgactcactagcatatcatagaccctcagtggtctatcttagcttaaacaagacattagagtctccatagactcaatgcaggtcacacacaatgggctcaaagctctcaacagcccaatatctcagaatacatacagggcttgaacggtccatatcatacacaagacaccattcacatggcctctcaggcacctcaaaaccgtcaacaaggctcttgcatgtcatatcaacaccaagtgacttacaacacaaccaaaaatgcataactcagagccaagaaccaaagttcacctatctaacatttgggagctaatccttcatcctcacatccttctaaacatgtttttctaaaggactcaaggctaatacaagccccatcacaagtgggtcactattcatccaaaaccccaaatcataaatcaatcggtcaatctcaaatttcttacctcagaattggtgaggaaggcctctagaccacttcctttggcctaggggtttgttactcactgccgttccatgtcaaattcgagctctaccactttcctttaagaaagggacttctctgattaaggggttccaagggtttctgatgaaggattatggctcactagaggtttccaacatgtttggtgatgaaaggaaagtacatgggtgaactaaagtgcaaagatgaagcttggagcttcaacaatggaggtttaggcgttcagaggaagaagaaggtgaaaatgggtccagaattcataatctgacccttttatactgggcctgaccgacatgccgcgccaatcgcgccactctggcattgatcgcgccaacttccagagctcacggcgccatccacaccactaccgcgccttccgcgtcaaaccccagaaacaatggcgccactcgcgtcagccccacgctactcgcgccaacatacagagacaatggtgctgattgcgccaaactggcgccatccaagccggttcccagtgctcacggtgctgatcacgccacactggcgttgatcgcgccgcagctctgcaactagattctgcagaaaactttagcgcttccagcgctgaacctcacgccagttgcgcgggacctgagggttattatattgatgtattttttgatgttgcaggttatacaccctctatggtcgactttgacatcgcatttgcgcgatttcgtgagaccagtcctgaggttgcagaatggattgattccatccccaaggagaaatggacacgtgcatatgatgtagaagggagaagatacagccacatgacaacaaacttggctaaatcagtgaatagggtgttgaagggagccaggaacatgcctatcacagctcttgtgaaacacacgtacacttgactggttcagtattttgtagacagaggtgaggcggctgccgaacagcttcagcattcacaacgatattgcgaaaatgtggttgaagcaatgaggcgtaatcagtccctggcttcagggcaccatgtacgaagatataacgttgctcgaacgttatttcaggtggatgatgggtgcgacaagtcatattcaatgtcccttgtcgatcgggtttgtcagtatgggaagttcaaggcattcaaatacccatgcagtcatgccgcagctgctgctttacatgtgcgccaaaatcctttttagtatgtggatgacgtcttccttgtaagtacgttggtgcaggcatattcagtgccatggcagccaataggtaacgaacaggccattccaccgggtgaaggtccagtcatcatacttaacagctaaatgctgcgtgccaaaggtcgtcctaggtccactaggatacgtaatgagatggatgaagtggaaacatcccagagacgtatgaggtgtggcatttgtaagcaagttgggcacaactggagagtttgtcctagtcgtggggggacttcatgattttctgagtggttgtatgtttttttttttaattgtatgttaatgtacaacgttattcgatatgttatattagttttgtattaactttttgtttataacgttttaatactaatcatctttgattttttcgttgtctgataatgtatgcatttgatgtaacaatatgttcaatgcacgatgtcaaacaaggtctgacatgatacgcacaacttgggcgttattaaagacgcacaagttgggcgtcattcaacacgcccaacttgtgtatgactgaacacgcctaacaaataggtcgtcattcaacacgcccaagttgggcgtgactgaacacgcctaacaaataccccatcattgcacacgcccaagttgggggccattgagccctatataactcacatgctcggcactaaaaattcaatgtgcatacgatggcattcttaggagaaaccagcagtcagaacattggtaattcaaagatagcgttcatttatctgaatggatcaatgaagcacgacaaaacagggtttgtttccaatgtgcaactccaattccaatgcgagttcctgatgactgttcgtttcaaaccctgaagagtaggatgtaactcacccttgttcttactgatgaccattttgttgataacatctactatcgacaaccatccctgcatgcaggtcagcactatttttttacttctgtggcactaacaaatgatgatgatgtttgcagaatgttaaggtgcagtgacaatatgtcgagtgctggcccaattgaaattttatgtgccatccacagaacacccaatggtatactcaacctacttcaatccacaatcgttccaacgcatgatgcaatgctatattacaacgaaaagtggaacataccccgaagagccggttttgtgggttatgcctttattggaacaaacccaatacgatttcaaattccttctacatgcaccatggaaagactgaaggctgtcatcaaggaagttgcgccggttggatttccccctgatgggattcacatgtcacaggtggtgagaaaaaatttttttcgacatccaggccatgcacaatattcaaacaccacaatcgaatatcacataaaagagttgacaagcgacgaagacatgttaaagatcatagcagaatcgaactactggaaacgcttttgtccaattgaaattttagctatttttaacaaaccggacatccagatggaatgagaaatgtgtattgaatatgttgttttacattattattcttattacaaatgaacgttctgttttgttttgtacttcagacctatgagtttactgttctttgcataaaaaaatgggattcacatgaattcgtgcatttcacggtaattataagctaaataatacttagactgagcatcattaaaaaaaaattaaatggcacaaacaaacaaatgttacctacatagtaattacactacacatcattgaaataaatggtacaagcaaccgactaaatctaagacggtggtggccacgtcacatgacgcgcttgtcgatcgggttgccttcgtcttcgaggtcggtgagaactgcttgcctcagccaggtctgcctgagaggggcctgcctgataaggatctggccgatacgggtctgcctcggaagggcctgcctcatatgatgggacatatggaggtagacatggagtgccctgctctgcatataatggcatacgatgctcaacagattcgggcacgtatggtgcatctattgcccaactcccacaacctgttgtggccaaatcaaaatccatgagcatctgctccaagttggtatgcatccaaccagcgggcacatccccaaagccaacatctgcagattggcactgcgtctgtgcgtccgtcggtggaggcacatccatgtaatagtaggacccattatgctcagtaggatcatgataaaagacttgactcctatatgtcgatgacataactggaggcctataacaacccggggcggcaggtccgggaccaacaatgggctcaggcacctgctgaataggtctccgtcgacgctctagaccatgtccctctcttctgcgacgaccaacttgaagagacaattgtggctcctcctcaagctgcgtctcgggagcttgtggtccagcctcgaccacctgacaactttgtgtgaagacagacattaagcgacctatctcctgattggcccaatcaaagtcgaacgtcgccctattctgcctaagtgtcgcgaagtagagcatctatatcccattgacctataaattcaaattcaaatatataaacgtcagtgtcaactatgtcaattatgataattaatgtaaataacaaaaaaatattcatcaaaacgaaacttacactacgacctatcttggcaccctccttggtgataaaccgcttcccattttccttgaaccaaaccatgtactcatggtttggtgacattaagccatggattaagggggaggtcgatgtgctcttccctgtgctgccagcgcctgataaacggtctgagcttacgaacccagttttcttctcgtttaccgcgcagtgaaaagtcgtgcacacccttaagcttcatggcaggacgtgggattggctgatccctcccaaattgccgcatgcatctatccgactgggaagcttcaactgtgtggaagtagataataggcattgatgccatccacaacaatcgctcatggtcagatgcaccaacgaaatggtagtccccatatggttcccagaccacctgcacataaaaaaaaagttagcttgttttatgtaatcacatgtaccacaaatgcaaacttacaattactaaacaatcactatacatacgttgtctcgagcgagagcatcgaaggccgtcctgtagtagaccacctcgtgcgggctaagcgggggtagcccattaaacctgttaacaaaataactaacattaaacaatgtaaggcttaattgttaaaattgttatcaaatgaacatataatcacacataccggtgtccaaaatgcgaatgtgggtccgtaggctgcgaaatacatggagcaaattggtgggaatctcagccacgcccacgcctgaagcagcatatgacatccaccaatgtcctttctggatgcatctgtacactcacacatctgtctaaacaaatgtgcaaggaccactgaggcccagctgtatcctccgttctatgggaaatccccagccaacaaagggatatagcgtgctgccatcacactacctccaaatcgatcgctgagcagccatgccccaagaaggcgggcaatgtgcgcctttgcaaactgcgtcacattaacgaaatctttatccaactgaccccaatccccaaaatgcctatcgaagtaagtcaatcgtagatatccaccggtcagctccgtttcgtcgtcaggttcttgaccaaaaacgtccttaatgacctccgcccaatcggacgaagtcactccagtgacgacattgccagccgtgggcaatcctaaaatacttgccacatcttgtaacgtgatagtcatctctccatgtggcatgtggaacgtatgggtctctggcttccatcgctcaaccagagcactaatcagcccagcatcaatctaaaacaatatcattgatcaattgacaagtatagttattgttaaacaaaattagatcatttatatgaggtgttgcatacctgaatatgtcgcatgcgtgcgacatgaagaaagccagcgtcacgcagcatatcagaaacgacttgaggaatattgtcatatgctgggccccccgacaacttgccacgtcaagtctttagtagtcgtactttgccctcgttccacacagcttgtgaaacatgggtgcgctgagtacgcctacacaaagtgccccaatagtacggggtaggaaccacataaaatgtcggatccatcggctcagcctcatgatccgatacagagcgcggcgaatcagatccagataaattggccatgttatcagtaacttcatacaccataaataaaaatccatgttaacaattatgtacaattcacaaatcattaaaacaacaaatttctaaacactaaaccctaaaaccaaaacctaaaaccatagttgtgaaaaccggttcgatcattgaccaggtcgaggtagtgggtcactggatcagtggtccgaaccggttttaataactttgcctacaatcataaaccctaatcactgcaccccgaaccctgaaccaaaccctaaaccatgcaaccagaaccatgaacccaaccctagcccaacgtcacatacctggcccaccaaaccctaaacccttaaccgcacaccatcgtcacaagaccatgaaacccaaccctaccccaaccctagcccaaacgtcatgtctcatgcccaccaaaccctaaacccttaaccacaaactatcatcacaagaccataccctaaacacaacctaaccaggcccagcaaaccctaatccatcaaaccgatgtacccatgcccaccaaaccttaaaccataaaccacaaaccctcataccattaccataaaccccaaccctaaaccctaataatttaaccctcatacaataactacacattaaccctaaattctaaattctaatcattttatccaaacactacagtactaaacacttaaacaattttctatctacctaaatttatgtcactaacaaattaacatcatcctaacatttttctaatacataaatcctaaaccctaaactaaaacaattattaagtaacctaacatctattttgccaaaaaataagtacatgcatcactaacaatataaataactaaataataacaacatgactaaaaatattgtaacagaggcaaaaaattaaatcaacttacttgttcgcaggattttttttgaaaaacttcacaattcagcagagcttcgctgcacaaaatatccaccgaaaaactctagagagaaggcagagcacttctagagagatggtggagatgaggaaatggtgggggggcatatttatagaaatggggcagttgtaacatgcctagattaggcatgttacaactgccccatttctgtaaatatttttgacacagtccctttttcgtaaatatttaataaaaaatattatttaggttcttttgcccatgttgtaagtatgtttggttcagaggagaagaatagaagattttttaaaaaaattaaagtagactgtaacaggtgtggatcacacggaatatagtacaatttcttttgtgtgtattatttccttccttggaaacaaacagcctcaatgtaatagtcccattccacctgaactggcaaggcatgaagcttcaaaattcaagccaggaactattccaaacagaccacttagacgaaattaatgacactgcttttgcgcattagacaacctttttttttagttagccacttctttagaaggcatcaactattcatctttgcaggtaaaaaaaaaaactaccagcaaatcaattgaaagcctttcactctcactttgttcattctacaatatgtgttttatctccaattggtatataagatatttgattatcacaatattatcgattcactgtacttatttttgtagctcttgatgtattttattgcactgttttatctacaaaggaggaagagttgttcgactttgtctctcatataacaatcggaacaagattttattgtcatattttatttacaaatgcaaaactatagcattgttttacaatcatatgtgtctgtgatgtgtcagcgtggtactatcacaatgatatgtctatcattttttaacaatttaagccttcacatctcatattacaacacaatatattcacattaatcaatacccgttaaattgattagattaaggaatatgaatatcaatttattttagtcagtggacctgtcaaattcactcaactaactttattatattgaataaaagatacaatcattaaatgaaaaataactcttggctacttattctgtatgaccatcaatattaacacttctcaaaatctcaatatacttgaatcacaacaactagtggctttaagatggtaaaaggaagaataaatttgctctaggagcagtgtatttttcaacgtctcaaagatgcatattgctcagatttcaccatcccagaagtcttcaatgctcctataggcaccatagatctcgtgaacaaaaaaattggccttaactagcctttcctgcatgagtaaattccatgtgttaactagcatttttgttgtagtaaaagatgtataggaaatagtaagtatcaagaaaaagaaaaaagatcatacgaagtatctaactacttgcctgcttaatttcagagatcttggtcatcaaatcttgagcaataggccagtcaaagatatcaaaatttcccttgattctggactccttagtgctcttaggaagcacactatgacctgcttgcaagccccatcgaagggcaacttgtgctggtgtcttccccaatctctctgcaatctctgtgacaacaggattcttaagaatatcacttttgagagctgctggtgaacctagtggagaatatccctgaaaagaaattcatcatatacacgccatcaatttaatttgagtgcacaccgaaatcattttcaactagctcaagacgatttcaccaaaagtgataatttttctttgcaattgatagttgagaaaatggattatatactacaatgtaaagtattttacattatcattcaatcacaaaatactatatatagtgagtttattgacttttgtaataactactttaaaattcatactaacacttagttttatttagttgacagtgtaaacttattttacattgtgagtgtatgaccattaaattcttgataatttataggaatatcaactcttttaagtgaaagtatatatcacatatgccaaacttacagatagatgaatttctttagattcacaaaatgcacgcaactttggctgctgccatcctgggtgcaattccacttggttaacagcaggaaccactcttgctatatctaacaaatcttgaagcttctttgaagagaaattgctcactcctatggctctagccttgcctgagtcatacagtgcctccattgctctccatgtactgggaatgtctggttgctcaagatattctttattgaatccaaatgttccacttttcatgcggactggccagtggatctacagcagaaaccaatttagtttgtttgaagacagaatgattgatgaaaatgaaatcaaccccagataactaaactctgcattacctgaatgtgtaaaaccgatgcactttgctcaaaccatagttttaatttaaagcacttaggcgaagagaaaacgtttttatttctcctattttcagtttaaaatactatcaagtcaccatgttattacgttaatcaactttgttgaggactaattttcaccgtcaaagaaccttactagccacttttagtgaaatttcttctcccaatcacgtttttttttttattcacaaagcttaaacatgattctattcacaaaggttaaacatgagatcttgcttgaggggtctgaatcctgtttgactaattttcacctttgaggagtctaaccagctactttagtgaagttttccttcttaatcacgtttttttcattcaaaaaactcttaacataagaatttactcgaggagcctaaacctaattccacttgaaatagttggttccaaagtttttcattcaaaaagtaaaaaagaacatttcctcgtactaaacaacacctcaatcttccccaaaattttcaacatgaattcacatatcagtaaatataatacatgcataccagatagaggtcaagatagtcaagttgcaattcctgtaatgttttatccaatgcttttggcacatcttctggtgcatgatctgaacacctaaaaatatagccaacaaatcaaaggatctttcattcagcatcattcagcaaccaaactggtcgaaacacatacaattttccccaatattcagaaagagatcacagtttttaaaagacaacaaaccagagtttggaagtgatccataagtcctcacgcttcaccacaccattatcaaaaagcttcttaagagcagaaccaatctataaaaaccaaaattaaaaaataaaatgtcaattcgctagcaaaaaaattactgttttcttgctattttgctaaacaaaatatataacgtactagcaacaccaataaattggggaaataatcaacaattcgcatcttttaattcttatagttgagcaaagccaaatattatgaaaaggaaattaaaaaagagaaaaaaaaaataaaccctgaattatataaccgatgtcaacaagttgaattattattacctctggttgattcttatacgcactagcacagtcaatatgcctgtatccaacctgaacaacggtgaccggacactaaagttagttatctcttcaacctaggagaaatcaaaactacggaaaagttggcctaaacaaatcaaaactaaaaaagctataactaacctatgaatttttttacatagcaattaaaaaaacaacgctcaagagttttacttacctgaatggctgtggtgagagcttcagctacaacaccaggttcagcttgccaagtgcctaatccaagaggaggaatcttggcccctgtgttcaactcaaagaatttgattgatttggccattttttctctctcaataacgacaagcacaattagttagaaatatataaaaaaaaactagtgatggatgttgagcttaattaaagtttgattctctaagttactatacaagggtaaataatcattttcgtccctgaatatataatatattgacaaatctgtcctcgaaagatcaaaaattcaaatattagtccccaaaagtttaaaaagtgcgacaaatccatcaattcattaactttcatccgttatattgatgaaagagcctaagtggcacattcaagaacgaatttgtcaacgctctatatattcaggaacaaaaatagctattataatttaattttcatctttccccttgtttttaatcgttacaagcataacattgcaataaacacttaaaaaaataagaaagcaaacataagttagaataaacataataataagcataataatgatcaataagcataatctatttattgctctgaaatttataaatacctcgaataaggcctaaggcattaggttttcaggtttttctcacttatgttactcaacttatcaatttctacctaatggaggacttcacctccacacttgaactctaacaatcttcccttcaagtgttagtttcttctacatgatagctacccctcaagtgcaagctttttcaatccatgagtattaaatggtggccttagagcttaatcattaccgccaacattctctcgatgatacaaattgttagaaaatcgacaggattaaattctgagaagatcttcaccaatagtctacaagcacaccacacaagtgaacttgacaccaccttcaatcccaaatcttaagacattaggtttgttggtctttttctcttatatgttacttaatttttccatttctacccaatatggaacttcactttcacacttgaagttcaacaggcaagaaaaaccattaggttgttccaatgcaagagatctttgtgacattctcaattatgagggaaatgtgataagggcaaagttaaccgaccaacttggtaaggatggtgccatcaagttgatactagtgttggtaataaatttatatgctgaatttcaaagaaaaaatatagaacaaaaacccaaaaataatgaaaatttggagaaactcataacaattagcataatcttcaaggttatcaaaatcagatcggaccaattgggtccaagtgaaccataaaaccaacttgttaaagaactggatagaaatcggaaaaaccaatgttaaatttgtgaactactgaaaatagttgttagaagaagatgaatctctcatgcgctagtaaaaacccaatgagataaaaaaatgagggagtgagaaagcctatgagttgtgagtcgtgacaatgaccactagggaggaatgaggacccaatgagataaaaaaatgagggagtgagaaagcctatgagttgtgagtcgtgacaatgaccactagggaggaatgaggaagatgaagatgatactgaagtgagaaagcttgaaagtggctaccatgaaatcttggctcatcatactgttggattgtgatgaatgtgtgtttctgataattaatgcagtttaataataataataataataataataataataataataataaatggttttctttgtagctaatgcaaagaatgatgggtttcaatgaaatctctctggccttttcatactttataaactatatacgtcttttgaatacatataaaaaaaactataaaagtataatgtagatgttgtaagcaatatttagactgggtctgatcattgatttggttagggtatcaaattattcggtcaggagtctacccaatgagtcatcagttggtctacatgattcagtctataattaaaaaattaataacatgtgaacttgtacatttaagatttaaaagtttaataaaattcaacatatttagaaacataactatgaacttgtttaaaatttgaacatgcaacatatttttttagaaagtatatataaagtacctgaagttagaatttaaaatataaattattgttgtacagtgaccaacataatctaatacacatacaaattagtgaaagaaaaattgaaaatggtagcaatttaatcacctcaaatttcaagatgtgattatgtttgataaaacatataagtatataaacaactcaagtgtaagatataaatttatttttctaatatgagtgatgttcatctaaaaaaaaaaaaaaaacccttaaaaatgcatgacccattgagtcaataaggtcgtgtcgagtccaactagatcatatgcaaaactgtttcaacatgtgactcaaaacggttgagtgcctagtttcccaagtcaatgggtcaacccggacaacccaagacaaatttaattactatgcttgtaagtatttggtgatactttttcactttttacatcatgactaatttcaaggataaatagttgtctactttgcttgctctttttccttagaaaatgagactcatgatagtgatatgagaaagtcaagttgttaccaatttcaagattttaaataattagttttgaattcatgcttagataatgcaaacttgaaccatttttttaataaaataatggtacagtgaaaatatattaaggaataattattaccattgtcaatatataatgttattttatttgatattatatagttattatattaaaaaattaaaataatattgttttttatttttttattttattaaatcagcaaataagtataatatattaataaggtatggtactagaggtaaataaatacaagtatcctgcaaaaggccacctccaagcacaaggttataaccaatattaacaacttagatatgtaaatatgtgttaacttaagaactataacaaaatttcgatcatttcaccctcctacccaatatatgcaactccaaaacaaagtcattgacaatgacttttgaatcgctacaaaacaaataaaattaagataattatgtagcataggattaacctaggtcgactcagagatacagtccaatttggttcctgacttaatccacttataaacaccaggagggtttatcaaacagtttacaaacagtgaacaacaattgcagaaacacaaacaagaattgaagaaaaatgcagaaactaacataattaataaaagatgttgtaaaacagattcaagaatatcaatctaattcaccaatccaagcaatgaaaattatcagagtttttagataatgatcatattatgaaggttaattcaatatcattatattcaattgaattaactcctaaattaattgaaatcacaaatcggattgaaatatcatccaaacaatctatgattaaaattcaaaattaggaaataaatctataacctaattcgttttcaatcctaaacatattcataatcatgaaaatcgaaaagaggattgaagaagaagatgaacattcacacaaaaattagaataccaaaccagaattcaaattctccttgcttggactggatccttggattgattgattgtttagctgtccatgatcatatgccaaaaatagaagaacagagatgaaaggaagaagaaaaataaagaacaattgagagaaaaagagaaaatattttaattctgaaaacttgcacaagaagctagaaattctatttttgtgtccctaaataactcctagctacactaatatatagtgattgaacagaataaagggatgagctctgattaggctcatctaaactaactaattatgctaattatatcaatcaaaactcaaactcgcaatccaaaactcaagtgcagaggttctgactttcaagcctaatttgaccctcaaactggcagaattagcccacgcttatctctaacaaaattgtagctcttttccttagctttcaagggactactcatatgctccatttggagtttggtagaatcctataggtcctacacaaggaaggcagatcaagtaagcacaaaatctaaaaacaagcaacaattatcaattaagtccaattatttgcctaagaccaaaattgagttaaagtaagaaaataagaatctaagataagtcaaacaacctaagaagaattgaaaaatatcatactaaaaatgttcaatcaatcatagggtgctctcctccatctaaacaatcaacaccacatatcctccctccacattcccatttttcccaccaccacctccttttgcttcaaaagaaggaatgacattagaaatcggtttgtcaaactttcccccattgagcgacatgtcctcccaaaatctaattttatttcccacccccactttccaaagaatacctttgtcaaaccaaccttgtctacaaaggccaccacaaactctctatagtagagtcccccccccccctctggtcaaaatgctatgtcaatcatcatgttttagatgctaaaacttccctccatagaccttcatcacaatggaaaatatttcatctccattttccaaaaatgcttctttgaatttggcaacattttccacccctaatcctcccatttttttgcttttgcaaatcatgtcccatttcaccctagcaatatttttgttatcatcatttccacccgacaaaaatattctttgagttttctctaatgtagagcaaacttccttaggaattttaaaaaataagaggtagaacaaaggaagagaagatagtaccgaattgatcaagcacacccaaccaccaaaagacacatttttatgcttccaaagggccaatccttttcgaattttgtatgagggttgccacatcacctctttctaaggattcgcccccaataggcatccccaagtatgaaaatttgaaggaaagaactttacaattcaacatactagcatacctctccaccaagagaaaacgaatatgtacctctaggaagaacaccatgagaatgaaattcctccaagaatatcataatatcacccttcaaaaattttccaaaactcattgatgaataagaaagtataaccatcctggacaggactcttttggctaccagaatcccaaattgcttccttcacctccttctatttaaagaatgaggtaagcataagattatcctcactagaaagatgatttatttctatcccatcaagcttcgattttcaaaatcttctaagaacctcctctcaaagtactttttcacctccatcttcaccatactatgctcttccacccaactcccctccatttgtagtcccttaagaaacattttcctccttttccaattaattatggaatggaagatttttgaattgcaatccccctcttttaaccgcctcaccctagacttttgacaaagcaatgattcatttgattttaccactctccaaaagtcttcttgttgttccagtcgtctattaaaatcaacttcacaaagactccctctctcttctagtacatcttgttcatttatctattgttcaatttgcttttgtttcaaattcacaagtccaaacacctcgatgttccatttttttaaaaccatcttcacacattttagcttttctttcaacacataggtacccaccccaccacattcaaatccctctatgcctcctccaccatcttgcagaatctcttatcttggaaccaacaattaagcacccgaaatggttgaactccatttattctctacctccattagaccatacttactctaaccctttcctctctacttcttacctccaagagacccatatcttcaatattattttatgaatattgattgaactgtatggttcaattacagttgaaccattgaactgtcacctagtattttaagaacattgataattttagtttatagttgttttctcctctaaatatgattttcatgaagaatttcctaatatttgtgggaaaataaagcaaaatacttattttgggcactattttcaggggtgtttgtttcatagataaattttttagtcccgagaatatagggggggaaagttttatctcgtgcttgttaagaagtaataacataattcatcctgaatatattttattcatgtgtaagccataaatttaagcaatatttaatcctaatgaaaggaatatttattcaatgggacaagaatcactcttagtgagtaaaaatacacatatatccttcttactaagcactaccctattacccttataatgttttccttcatgtacattttttgggtaaaatttaactatgggtcaaatagtcatggggtcgtgatggattgtactgactttattgggcattgtatttgaaaatttcatgtgagttgttacatttttacctattttgtatatctttttaacaaactttaacaataaggatattttagtaattattatatatgttcctagaaaaaaaaagtcaagcaaacacattttttaaatattcttgggcatataaaaaatattcttaaccatttttaatagttaaccaaacacatttttataatatacttgagaataatattctcatatgttattcacaggaataatattttcgagactaaaaaattaggataaattatatttttgtctttctaatttattatttaggttcagtttttaaaatcgattcaatttagtcttgccagctaaattaagcttatggtgttaagaaatgtgtgtttttaggcacaacttttggaggcgtttgtttcatggataaattctttagttccttgtttttgtcgccacgaagtgtgttttcttatcaccattgacccaatttagatggtaggaacaaactgaatcaattttaaaaattataagatcaaattgaacctaaaaaaattagaaaactaaatttaatctaaaaaataaattaaaggatcataaaattaatttaacaaaaaaattattggtaaaatagatgtctcattacaaaaggaccaaaatgatgtaattagtctttaaatatatcatgattcattgctcttttttttttgtcaaaatctaattggttaatgtcaatcttatataatgtttgatacccaagacaaagaaggagaaaatgatgtatgacaagacaacatcaaaatagtaaggttaagaaaatcaatgtataataaaatatttagattagaatcatgcatattcctccaaaattatggtaaatttttatacaaataataaaggccaatctcatttcatctttgtttttttgttgctaaaatatattttaggtccctaataaattaaacccaaaataagatttgttaatttatcagagacctaaagcatttttttttcatgagttgcatcccaattttaaaagatctaaataatggtattagttagggttgagcattggttcggtttgggtgggtttaggcccaaacttatcaatccgaatgaaacttacctaagcatttcatggtccatatcgaactgtttgggactttgagtgtgggttacggtttgagtcgggtgggttcattcggattggacccattttaggcaaagatagttttttatgtcaaaaacaatattttgacatttttaaaagagtttttcttacttttttaaaaaaagaccacaataataataataataataataataataataataataataataataataatatttactcattgtcaattataatggcccaaacggaaaacttagtaataataataataataatggcccataggctaaaattttgtatatacttatcaattttaattattaacaatcttctgagttgaattagaattgaactttaaaccttgaaaattgtccatttaaacaatgaattaactaatgagaattattattattattattattattattattattattattattattatacaaaatttacaagttatgtggctataataatacttaccaatttttaatggaaatagatgcattaaaggaaaaaaaaaactgtaaacttaatcagaattacatatattaaagactaaacctatgaagagtatacaataagttaacaatgcaaataattaataattaatccattacattcatcatacatttgaacactaattatgacataatatgcttcttgtaagtccactaagttagccttgaaggagcatcactagaattcattgcagtattacattggtaaacactacaaaataaacataacacctagtttacttaaaatatagtgaaagcaatcaatctgaaatcagtaaccatcatcctatatttcttatatttaagatataatcaatagtacaatgtaatgtcaggttaaataacaacctcaattgtcctctatggacttgcagttgttggaaagatgatagaactctagttaaatgcaaacacacatcaacattttcatcagacacagtctacatcttaagaaatgtgaagtgtataaactattaatccctagcaagagtgaatgatgaagacaaccatccaaaaagtaaataaatattcacctttgaatttttgtaaatccccctagtgtagtacgttgatttcaagtagcatggaagaagggattgagccaatcaatgtcaataaagatcatatacctattcaaaggcaaaaaaatcttgtaaagtaagtttatagttttttaccaacccaaagttaaagatgaagagaaaaaccagagaggcataccatttgggtcctaaaaaatacttgtatatttatgttcaaaattcttacagcctcaagtgcaacctgaaacatattgtaacacattatccagtgtcaatacaatgtattgtaattctcaattatcaattcccctcaagcataaaaaagaaggatatgaagaaatatagagtaattaaaatatattagtacctattcaactagagatcaataagtatgcttgaattccttagtgtttccctttgtattcttccaagttttcatttcagactaactggttaaaggggaaaaaatcacccactgcataaaaataggcttcaatatgtttaagatccctaataaatgattgaattttgtttttggtccctaataattttttttgttattttgaatcctttatatattaaaattttgttttgagtctctgttgtcagttttatgatggcatgacaccatcacaaccgttgatgatgtttgaaagatcagtttgtaaggtgacacatcatcacttaactgatggtagggattaaaaaaaaggttttaatacatcgatgactcaaacaacgaaaatttttattagggacctagaacaaaattttgtcatttatcaagggccttcaacatattttagccataaaaatattccaaaaacagaagtaaaattatttaaaccattaccccaataaaaccaagcaacaagttatcaaatgattgcaaaatagatatatttcaaaaacatcaacaaatttagtctcaaccatgtctcacatattggcttcaaaatgacataaaaaaaaattttcattacataaaataaaagagaatcatgttagcacttatcaaaaacataattcactaaataaaaataataattataatagtgagaggtagtcaagcagtcacaaataagaccagtcactacattgattgtgactaagatgttgaccatctgcagaagtagatccaactccttcatgtcctactattgagcatccttgaaactctaacacattaaacataaatgtcaaggttaaatgcaacaacattaaaaacaaaataatcttaaagctaaaactgaaaatttcaccatatgttacaattttctcagaaagttcaaactcttcattgatattgagactattaaactagattacagttgtcctcaactatttcttagcacaaattagtgcctcatccatttctggttttagtgagcttctaaaagcatccaaaattctagccccagtactgaatgcactctcaaaatatattgttgaaatagggtggccaacacacccaacacatctctaaccattgttaatagtatgggaaaccatgatgaattttgtttcaccatgttgtgaaagactgacccatttgacagtatgggattgtctggattgttacttccagggagagcaatcaatcatagctgatagagaaggatctttttgtcatttgtctgatgcaagggaaaataaagatcaactgggtcaatattgtggtggacaacatgttgaagaccaagagaattggattttcaggttcccctgtgtagtgttgatctccaagatccttgatcattttaacgtggatgtttaggatgagattaatgactttcggatgccagactgtgaggtgatgaccaagattcctaagtaaatggactatgttgtagcgggtgaagaaggaccaagttggattgagaagcctaaggaagcaggaatataggaagctaaagagaatcatatgagatcttttgagtagatgatgatggcaaagatggatgagctcatgaggatgcataaggaagactatggagagatgaatgaatgctttgagactcttagagaggttggatgctaagagagcgccatatgtggatgacattttaccatacccttagctatcctacttagtacaccctaagagcctaggatagttagcctttaagctctttaggacataatctttatattgtgttttctgttatgttactatgttatttggatgatttgttaatgacttgtaacggctttttagcctcttttgattgaaatatatgatatcattttctattttctacctttttgttatacttttatctgttattctcatttgatacacactttttggctttgtgatgccaaaaaggggagaatgatatgattgacttgagtatgtacctagtttctttaattgagaatatgctactgatgtgtttgttaagcataatgtagaacaagtacattgagaagaaaaacatcaatacacatcatatggtttggcacgatcaaaaccaaaaagggggagttggaccaaaagattgaagccttcaagattagtctttaggttttagttttgatttgattttttacaatgccaaacaagttttacaaatattgcatttgtattagatatttttatactaggcattgttggatatagcggaagttgcaagaagaatcaaaagcaagaatgaagaagaagcttgatgattggcttgaaattgtttttgctttatcttgcccaatcaagtatgaagacatgtgccatgtgtttaagtttgattcaagtacattgctttctgttccttgcattgccatttgcatgtctcattgaatttgcataagtaggtgctattaaatcttagaagttgctaaatgacttaaaaggaaaatagattatcatggctttgttttgaaaaatgaaattttattgttttaattgattacatagtgctttaatcgattaaaatgttcttattcatatctggaaaagccatgaataatactttaatcgattacatagtgtattttggaaaaccatgtctttctgctttaatcgattaccatatctcgtaatcgattacataggttttttagaaaactctgcttttctgctttaatcgattacattgtggaataatcgattaatctgtttgtgatctttttccagatttctgaggaacaatttaatcgattatttagttactttaattgattacatatggcaaataatcgattacgctatcgttttaattgattatagttagttaattctgttttttaaaagcctttgaaagtcagttctataaatatagaacttgtgcgaattattctatatctctgagtgacttaccaaagaaaaactaagctttctaaagtgtccaaggtactgattccacagtgagtaatacatcttgtaaagttcaagatttctgaattttagaaaggatgtgctaaagaaaagaagatttcaagacattgattctaagctattgaattcattctacctggattgtgtggtaatcttgtttcatttttcatgcattcatacatgatggatcacgggtagtgtttgtcttgaatcattctttttggatttactaagagtttttgttttgttgtattgtaacttttcaaattgattccttgtaaagcattctagagaaggttctctgggtttgaagatttgagtaggtttctcaagatctttgtgacttgtattctaatagtgttttagaatttaggatctttgtctagtgttgatagagatagtcacttgttgtgcttgtacaagaataatttgatatagtgaaaactctaacctagtgttggttggaagaaactggtgtgtaacaccccggacgtgttatcattaataatatcataagcgcgctatcagcgttatctgaacgcagtgcggaagcgataggatcatttttcttgattacattatgcatggaatttaaaacacaacacaaagcatcataaacaagcccctgtggatccagttatctcaacacacaacaacataggcagaaaacaaagaaaacaaaacagaaataatcaggaggaaacataactcatatacaactcttagttctaccacatctgtagttatacaacataaacatgtacagaacagcaggtgtatactcacaccctatccctatacagggtacaagatagagatcaaaactaagagactcttctagtcttcatctgcagcccatgaccactccagcaccttcagctagggcctcctgccctgtggttgctcctctccttagagcacctgaaaaccacaacccacaacaggggtgagatatacatctcagtaagctcagggttctgggagatcctcctttaccctggttcacccccaaacacagacatagagaccaaaatataacaaggcctaggacatcatcctggccgtcacacattccccagttctctgggtactaaccggatgctacccgcatcagatgtattccacctcatgctggctctcaagccatccccagactcgtctcacagaggtactatatcataagtgtcaaccactggacacttcttatactagagaggcaccgcctcccaaaatcatgcaaacattgcctgagggctctcactcaggacttactcatccagatatggctcatctaagaggccctaggctctcaccccctcgggaaaccctctcttagagatacaacatatctgtcaattgcctggactctccaggactttcatatcacatgcctgggcaagaacatccatataggcaatcacctccaggactttccaatccaatgcctgagagggatcatctcacaccggaggcactcaacccctcagggcttcacatcacatgcctgagagagatcatctcacacaagaggcactcaatccctcaggactttccactgcctaggagagatcatctcacaacggaggcactccatcccccaagacttcccatcagctgcctgagagagatcatctcacattggaggcactcatccctcaggactttcagtccactgcctgagagagatcatcccacaccgggggcactctatctctcaggacttccacatacactggcctgggaaagaacctcctttacaaggcaatcacatccaggacttccacatacactggcctattttgatgaacacctcacagtgttcatccatcaaagacccatggccatccacacctgccacatcaggtgtctcattaccctcacactgtctcagtgtctaacctagggttcatcaatctcagcccagcacatactaggccatcatatattcatatatctggaactgtctgagtatcactccaagtaccgttcatctagcccctcaggcgccagacacatacataatcaaaataggccatactggcctttcattccacagcatgcactatatatatatacatatatacatgtcaaccatggcatgcaagcatcacccacttgggtggtaaacaagagaaagggctaacccccagaacgatgagcttacctgacaagctttgcctcacagctctgctctttgatcgatggtctgctcctctgacacctcgtgtcaagccctatcaagacataaatacgcacattacagaccacatcatgcataacaagttcaagctcatcagacagtcatcaactgcctcaaggaaggaacctcagtcctttccatcatctcaggttatctagcctaaggttcctcaggctcatcctctacaagcccttccatagaccctcagtggtccatctcagatcaaacatggcctcagagtccctctagactcaacccaagccatagacaatgagcatctcagctctcctcacccaaatactcagggtttccatagggcttgaacggtctaatcactagacactgttcccatggcctatcaggcaccttaagcccctcaataaggctcttgcatgtctcagatcaagtgacttagtccaagtcacacatgcacaacctagagccaaaaccaacattcaccaaatcacaaactgaaagctaatccttcctcctcacatgattctaaacacatctctcaacaggacccagagctaattctaactctatcatagatgggtcactattcacaggaaacccccaaatccaaaatcaatcggagaaactcgagtttcttacctcaaaactgccgaggaagacctctgggctgctctcccttgccttagcgtctatagaaacagctaatcctcgcccaatctcgagttctcttcagcctctctcagaggaggagtttctttggggtttcaaggttatggaggaaggattctcgctctcacttggtttctaaggggtttaagacgttcaggaaggggtttgggtctcaaaacaaggtcatggaagcttgggaaggtccagcaatggaggaaaggctcaaggaggaagagaaacagtgtttctccctcagaaaacgcgagcctccttttaaaacagtctgcactgaccttcccgtgcgatccgcgcgggacgccgcgccagctgcaacaactgtggcgccatcagcgccaccctggcgctaccagcaccagcttccagagaccctggcgcccttagcgccaatcccacgccatcaatgccagattccaaaacctgtggagctattggcgtggccatggcgcccctagcgccatcttccagtggccatggcgctgtccgcgccaactctggcgcgccacacccttaacagggttttctcatcaggacttctggcgctatccgcgcggcatcccacgccgtccgcgccagaaatcaaggtcttacaattcacccctccttttaggtacatcaataagcataattggatattctaattcaaattttgcaggatgcaaattggatagaaaaagtactagtgaaacatgtcacttattgggaagctcactgatttcttggaattgcaagaaacaatcatgtgtagccttttccactactgaagttgaatatatttctgctggaagttgttgtgcacaaagtctatggtagagcaacaactacaagactttggtattgagctacaggaaattctcctgttgtgtgacaacacaagttctatcaacatttccaaaaatcctactatgtactcaaggaccaaacaaattgacatcagacatcactttattagagatcacattcaaaagggtaatatcaaaattgagtttgttgaaactaaaaatcaattagctgatatttttaccaaacccttagcaagagatagattctattcacttagaaacatgctaggaattctagatgaatctagtgtgtgttagcatgttgtttatatgatcatctacatgaaaataaaccttatacttgtcattcatttcaaaagcattcaattcaaaatgtgctgcatatttactgtttattttgataaattctctatgttaatcgattaagtcacgagataatcaattaaatttgctctaacagctgtttagactaaattttgagcttttgtaattgattacatgagcgacgtaatcgattattcttcatttcaaatattttttaaacataacgttcactgaaataatcgataatcgcatcgaattaatcgattacacaagttgaaaaacctatgaaaaatcatttctctctagaataatcaattaccacagttcataatcgattacacttcatcttcctgaaatggaacttcactggtttaaacgattatacctcgggttaatcgattacagcttatacaaaacctatttttgcttatgaaataattgattacttaagcttgtagtcgattattcatggagttactgcaaaatgttaaagcttttttgggatttgtaactgcccaactgccacctaattcaaaaatttgaattatctgagcctttatgttaatgagttagtaagtaaattcgaaatgacagttatgctttcaaatttcaaactttggagcccaaaaccatctatatatacagccttgatcttgagacaaatcacaccattcaagccttgatatacctctctgcttcccttctttagagcccagtttctgtgctttttatttctcttaatcctcacaccaccatgtatgctcccaaaagataaaaaatctctaagaggaaggctattgaaacttccaaccttgttgtgagtaggctagatcattggttcccagctgagcgtgataagattaattacctacaattcaatgctaccaagcttatctgccctcctaaacaccttgatcttgcttggttcaccaaagaaggctttcatttccctgcattgattgaagctcaaggattgaaaaagtttgttgaaatgaagggtacattttaccttgaacttgtgaaggtgttttacacatgtgccaaagcctccatggatgggactatcctgtctcaagttaatggggtggttatggaaatcactctttaggtctggtaagaagttgctggaatttcctttgttgctgaaaggaaatttgaggaagagactgagggttacaacagagttgaaacctatagaggtatgatgcttgatcctcaaatgagactaaaattgtggctgagtattggtccaatgactcatgaggacagacttcttcactatataatcacctacattctgaccccaaggtccaccaatcatgcacaaaccacaaatgatgacatataacttgtgtatggcatgaaatactccattcagatgaactggatcctcatccttgaggaaaccatgctgaaatctaagaaattggtgaactatccctttccttatgttgtccttgtgtctagattcattgattatttcaaaatagatgtctccaatgttgacaataccaattccagcaacagtctcatcaaggagaaacatctcaacaagcttggaatgttgaagactccttatggctggcagatggctggacaacaagtgtctcctaatggtgttgaagatgaaggagatgtggaagaagaaattgaagttgaagtccctgctcaaccatcctacaacacatttgaatctttgatgattcagaagatggacgctttattgtctctacgccatgagcacagggctgagacaaattcatctttggaagagatgaagtctagattagagaacatagaagctaggcttgttgttgatgatgttgacaaactagtttaaattacttatgttctttatgctttcttcctatttctaagtatgttgtgctttgtttaatgcttgttattttcaacctctatgtaatgcgtcattttccattaatataagttatgttttctcctctttatatgttttccttgtccattattttttgtctttaataagccaaatagggggagaaatatttgaaataagataggggagataaataagacatactctgtatgatgatgtgttgtgctctgattgtttgctctgtatgcttatgaaaaattatacaagtaagggggagcacatttaaagcatttgatacttaacacctacttaacacttgttcttgcaaaagctgattcaaatttcaggatatcaagaattatttctctatcattcatccctcaagtgcaatcaaactttaaacaattggacagttgatatttggcatgctcaaagcaaaaaaaggggagattgttggatataggggaagttgcaagaagaatcaaaagcaagtataaagaagaagcttgatgattggcttgaagttgtttttgctttatcatgcccaatcaagtatgaagacatgtgcaatgtgtttaagtttgattcaagtacattgctttatgatccttgcattgccatttgcatgtctcattgaatttgcataagtaagtgctattaaatcttagaagttgctaaatgacttaaaaggaaaacatattctcatggctttgtttttgaaaaatgaaaacttactattttaatcgattacacaatgctttaatcgattacatgattgagttaatcgattacatagtgtattttggaaaaccatgcctttcttcttttattgattaccaaatctcgtaatcgattacataggctttttagaaaactctgttttttctgctttaatcgattacattgcggaataatcgattaatctgtctgtgatctttttccagattgctgaggaaaaatttaatcgattatttagttactttaatcaattacatatggcaaataatcgattacactattgttttaattgattattgttagttaattctgttttttaaaagcctttgtaagtcagttctataaatatagaacttgtgcgaattattctatatctttgagtgacttaccaaagaaaaactaagctttctaaagtgtccaaggtactgattccacaatgagtaatacatcttgtaaagatcaagatttctgaattttagaaaggatgtgctaaagaaaagaagatttcaagacattgattctgagctattgaattcattctacctggattgtgtggtaatctcatttcgtttttcattcattcatgcatgatgaatcacaaatagtgtttgtcttgaatcattctttttggatttactaagagtttttgttttgttgtattgtaacttttaaattgattccttgtaaagcattctatagaaggattctctaggtttgaagatttgagtaggtttctcaagatctttgtgacttgtattctaatagtgttttagaatttaggatctttgtctagtgttgatagagatagtcacttgttgtgcttgtacaagaataatttgatatagtgaaagctctaacctagtgctggttggaagacattggatgtagcctccatgtttgtgaggtgaaccagtataaattgttgtgtgattgtatctttatcagtataactttcattactcttggatgaaaatcaatagacaaccaatacgagatatttcagtcattacatgcatttcaaagtgttattagattgaaaaagaaaatttgtttttgatcaaagggtgattgtgtgatacgatccttgttttaattctgcaaatatttttttaagaaaagtttttaaagttggtattaaccaattcacccccccctatcttggttatttgaagagtgttcatagtattttcagacatgatgcttgatatagtttaggttttcttatatccatgcttagtgtgaatcaaatatgctagaaaaatggactgatttctaagtttcttaaaagtaatgagttcaacatagtgtaattgtttacaaggtcttgtaatcaattacaaagtattagaacaagcaacaaaactcacttctacttgaaatttgacaaaaagtatcgaattaatcaattaccactttttataattgattacaaaagccaattccaaaagaaggaagactctatagcttgagataatcgattactatttattgtaatcgattagattgcatctgcaaacttaaggagttgtgtgtgattaaataattgattaccatatttgatagtcgattatccgaaaagccaaaaaagtatgagaaactctttgtttgaaacgagataatcgattatcacgtttctggaattgcagaacaacgaagaattttgacgaattaattaattaacatatttgataatcgattaaatcagttttgtttgtcagaattataaatacctttttgtaataccttgaatttttaagcatgtgattaagcctagattaagccatgattaagagtaataaacatgctttagaatccctaagagaaaagcttgaggaaagaaggagaaaatagattcgaacaactggcgctaaccgcgtggggtctggcgctaaccgcgtgggatgcatgaaacaggccaatggtttcggccatttcacgctattagcgtggaatatggcgctaacagcgtgggttgttcgagtctgtggcgcggccagcgcgggagttggcgcggtcagcgctggaagcctggatcaggccaatccttgcggccaattcacgcgatccgcgtggggttcggcgctgatggcgcgggtcattcgaggtatggcgcgatccacgcggctcatggcgcgaaccgcgcgggacctcgggcaggcttttataaatagcttcatttggacgaaaactgaagggaaaaaggagagagagagggagggaagccattgatggaccattgagcttcatatcttcttcatttctcatctaaacacctctgacccaactgagaaagtgttcagagcctcgagatgagctagtgacccagctttattctcgacaagaggcggtaaccggcgagatcgagatttctaagggagcccttggaatcgaagaatcagaggcgaaggaggccttgattgagcaagctaccttagggaaagtgattccctggtgtgtctggactacacagaggtaagaaactcgagccttagtcgttgattctgtgtttgagtttttggttgattttgaataccttgagaggtgtttttggaggtgttagagccgtaattaggcttggactctatagagttttgtgctcagagggtagttctgaggaagttagagccttgaatcatcattattgatgaagtttgattttggctctgagtatatatgagcagaggtaaaaggctagttatatgactagtgtgaaccttagagcagttgacaaagttgttcatgagatagtgtggatgttgtttgtcatctggaattggtgataatgagaagtctggaattgatctgtataagcagggatatgctttgatcagagtcatggcagagactctggagccttgtgtaggctgagtaggatccttcctgagggtctgagaatcacttgtgaagtgattgttatgagttataggaaaggaatcgtggtttcctttcggtttaacggcttagaaccgttattgataccttgtactcttgttttctgtaggacgtgagcttgatagctctggtggtgttgaccacgaggccgggagagccagtgttttgcctagagcaggtaagctcttggttcttgtttgtgtatcctttgttgagttccaccattatcttattatggtgatggttctgtgtaatgttatacatgtatatgtgaaaattgtgtattgtgactgatggctgaatgttgtgttgttccctgtgaaagggaaatggatgtacattgatatatgatgcttgttttgtgagctatgccctgagattgggtgattgatatgtatggccatgatttacttagcttattacttgcatggttgattgttgtatcctattgtagtagggtagatgacatgtgattgagtaagtcccgatgtgagatgttcctgtgatatagacgtagcctcccgaatggagatgttcctatatctacagacgtagcctcctcgggcaattgtattgagatatgatggagatgttcctgcgatatagatgtagcctcctggggagatgttcctatatcagcagatgtagcctccttgtaaagagatgttcccgttatatagatgtagcctccaggtggagatgttcctatatatacggatgtaacctctgatagatgcattgaaatcctgccatgagatgtttcctagtatatagatgtagcctcctggttggagatgttcctatatatctagatgtagcctcagcgggatagtattggatatgatcatggttgtatgccatgaatttagtctgattgtggtcgggcagagatgcattgttgtgcatgagaattgattgagtgattcactgattgttgtcaggtggacatatattgttgatgtggattgttttgatatactattttcatgtatatgtgtatgaaagtgaaccaggggaaggaaataccttcaagggccctgagtttactgggattttatatctcaccccttgtgtgggacatatgttttgcaggtgaatcctcaggaggagcggatagatctcaaggcaagaagcctgtgcagggatagctgagttttgagaaccttaggcatagatgacttgagcatgtggctctgatattttgtagtgtgcctttggtttgattttgttgtaccctgagggtatatatatttgtacaattttgtacttgtacagagactttatgtgtattcaccatactattatgtacagtgtatgatagtgacctatgatgacgtcactcttagttatgcttccaaactgcttaaactctaatgattatatatgtatttgctgtttatgcttggtaatgaccctgatgattgagggggcgttacatttttcttgttcttttcattagtgactcttgataaaatcatatagttgagaaaacatttcaagagagttaactaagggaatttcactgcatttttcctagagaaacaagttgatcaagattcgttcatagtttatcatgatttaatcattattggaagagcttgaagatgttgtgatctacatatcaaggtgtatttgtttcaattatgtatgtattttttgtttctgatcttggttagggttactaagagttttgtgagttaatatggtttcaactcctgttctttctcttgtagggttcaaggtgtaaggaccctcaagcgtggcgcggctggcgccatgagtggcgcggttagcgccaggttatgaagagagaaaaatgtgtctgaggtctggcgcagatggcgccagaactggcgcggatagcgccataaccactggaagttggcgccagggtcacgctaaagcgccacaaattctggaatttgacgccaagggcgccaggatggcgctgggggcgccaaggtctctagaagctggcgctaggagcgccagggtggcactgatggcgccacagtttctgatatctagcgcggggagcaagggcgtggcgcggatggcgccacaatggcggtgcagctggcgcgatcagcgcgggaactggcacgatcagcgcagcaggtcggtgctggccattataaatagaaggctcgcaattttctggagagaaacactgtttctcttcttccctgagcctctccaccatttttgagtgttcccaagctccctaaggccttgatacttcaccaaatcacttcctaaagccttgaatcatgaggaaaaccatgagtgagctaaaatccttcatcccaaaccccttgacaccttgagctgagagattctttctcagaggagagtagaactcgagataggcaaggagtggcagtgattctcggacactagagctagaggaagtggtccagagatcctccttgccaattctgaggtaagaatcttaagtttctccggttaaatattgatttgggggttttctatgaatagtgacccatttgagttggggctagaattagcccagggtcctagagagaaacttgtttagaactgtgtagtgatgaaggattagctttcagaattggatttggtgaactttgattatgggctctgtttatgaataagtgactggtgttaagtcactagttgatgttaatatgacatgtaaagagccttgttgactgttatgaggtgcctgagaggcatagtggcggtgtctgatgaatgtcatggaccgtccaagttttattggatattgagtacttgagctgatgtgagctttgagctcactatttgtgattgatattgagtctgggagtgactctaagccttgattgagttgtgagctcatgatatgtgaattgtatagagtctgtgtagacacagatgctttgattgagccgatgagagctttgaggtgatggtttgtagcttgtgtggagtctgtgataactctaaagccttgtgttaagctgtgctagacctagaagggtcggtgagagcctaatgtgtgctaggctatgataaaccctaagttagaagacttatgtattatgctagtgctggttgcatgataacatggattgtgacataagtatatgtgcctggattagggctggacaccaagggtgtcagtggcgggagccacagatcagggagagaacatcagagcgaggctttgccaggtaagttctgtgtccctggggatgattttccacttggttgcacaccacactccgggggagtggtggtcatattcatgatgcatgcatttggttgattgcatcctcataatgatatgtgtgcaattatgctttgattgtgattatgattgtgatagatctattggccaatagatagatatggacctccctaggatatgggttcctcctagtttggttggctcatggtcgattatatcccaggggattggtgatcctccagaccaaggggatagaagtcgagggttctccttctattctcggaggtaccatatacgtgcatccatgcgaagggttagcacccaatgggatggcacgggtgtgagtttctggtctcacactgatgtgggcgttgatgatatccgccaggcgttgatgatatccgccatgtatggagcaagatgacttgctcatattgttatgagggccagagggcctggccagtgggccaattgttgtgattgcctgatgtgtgtttcatggaaagtgggccagggggaagagattcctccaaggaccctgagcttactgagatatgtatctcaccccatttggggatttatatttttcaggtgactcttctgaaagaagagaacagtactagggcagaaggcctagagaagacagtatatgcatgaccagagatttcatgaagagagctagatagctcattttgcttggatgcttgttggtgccttatagagggttgtagggcatataggcccatctgatagttgcatatggatatgtaccctcatgtgtgaggaaagttattcttttgtataaccactggtgtggttcagactctgatgatgtacatatattgagtatataatgataagatatttccttctgactttatctgaaattacttggttatctgcctatatgatttgatgtattaactagatcagcaggggcatgtattatattgatctgatgcatgtgatgtattgaaatacttgtgttttgattgtgtgtatgtattgctgtgttggaataatctatacataatgaaatcaagaaagccgatccaatcgcttccgcttggttttaaaataacattttatgcgcgattctgatattgttaatgataatacactgggtgcacacggggtattacacaagggaagagtagaattgagtgaatcatatgtgcatcgtatttgtacttgattctctagttgtggaagttctaaggggtcttagaacaacaggatgtaggtgctaagccaatataatttttatttgtgattgtctttctctttaactcttagttttgtgattcaatcttggtaatgaaattcttgtgaaagaaccataaaactttgtttttcatatgatctggttttcattgttttcctggttttgataatcttttgtaacaagtttttgagaaaaccttgattgaacaaaaggggaatgttttacttgaatttaaatcatgaagaggtaaagattttgaaagaatctattcaatcccctttccagatttttggctatcctaacaacatagtctttagtaaatgagacaatgcaattgagggaatgagttaaataaatgatagataataaattgaatagggatccaggaacataaaggacattactaagggggagagggagtaccaaatccctaagactatgtttgagaaccattagccaaactaatagaaggtaaataccagaagtagaaagagtagggaaaagggatttattactagtaatatgatcagtgacacctgaatctaagaaccataggccaagagatggaaaaagaagagatgtcagcaaagaaaataccaaagtgtgcaatataagcaatagaactagaggcatgacgctcctgataccacttgatgaagtcagtgaagatggtcaaataaactggtaaggcaaaaaatggttgaatggaagtagcctgagtagtagatgtgacatttgttgtatggggggagaccatggagacaatgacatcgatcaatgatgtgatggagcttgccacaatagtcatacatgagtttgggattgtcaaattgggttgggttcacccctagttttcgagaacgaccacaatcacgactctaagatgccaagataaaggagtcaattggtgcaagagaaacctctatagtagcgaggtagagagatggtgctcgatgttcgacaagaggttgatgtcggtggtgagggacaatgatttaattcccttttgattcttgaattttctacctctttgtgttttgattttttttttctatttgggtttccattagattgtggcattgttgcttgaaaatgaagttgttttggtttggtttttgtgtttagtggtgtggtcaaagatgggggcttttgaattttatggaagaggaggcggaggcagagtcaaagggagaaaaggagaaaatacaaaaatagtaaaaaataaaacttactctagtgataatttaatcttgtttaatcaacatcacacggagacactctttctgataacaaatagttcaaaggtgtcatgtttcactttcgtttgggttaatgaagagaactaatgacagaatgaaattgtcagactttttataaattcaataacaaattttaatttttttatctatcaggaatctaactcttagaactcaacaaatttaaagatgaaattgaatatttaccctaaaaacaataaactcaatcaactcctcattggttatgttatgaaagatgctccacacacttgcatattagcgcctccaaggtagatataaactttaaagcacttttccaaggattgaaatttgaggctgtccattgtcgaatgatcgaataatttgtttttctctctatagtctgacggattcaaatctgttttcttggtgtcattattcgctgcatacttttatctaccacatatcagtcgatggactcttctactggcataatttccgcttgtgtgttggccacacacttatgaaatggctccactccgcaacaagcatctttggagaaatctaccaaccacatctccacctccaattaacacaagaaatatctgcgttcccatccagcacatgcatgataaagccaaaggtccacttgatgaaaaccacgtacctggtgcctgatttagcatgacttaaatttggtaatctgaagtctaaataaattctaactgatttaactttaaaaatatctttaaatttcaatttgagtactatcttcaataaatatgcttaaagatagtttatagaaatattattgctttatcgtatgaaataaaaaaaattaactaatattcttaatcaacttgaaattaaatattttctcttattttgagtcaagaaagaatgtaacattattatcacttgtcattatcatctcatacaaaaagaaataaaaatataattgttatataaaatgccatgggttccacagttgggcggctgatattattgaatttttttattatcatgctatagaatatctatcaaaaaaacttattgattattttttataagattctttttttcaataatatttttttctatcagcaaaccgatttgatgtgagtgagtgctagaaagagaaaagaaaaatgaggattatgtttttgtgagaaaaaaaaaaaggcaaaaggtttgttaaacataattgtaccttctacagaacatatatgtctttatagaaacaattcaaaatagaatttaaaaatattaaatgaaattaaaaaattaaattgaagtcatgaacgaataaaattttatattaactgttaagatatgatcttatcctttgatttactcttaattataatagaatgatatttattgctttttcttgttaaaatttaaattcaactaaaaaattaattatgtgtttttaaattttacttttattcaactggttgtatcttataaattcatttatctttaaaaaaaatcctttttaattgactttcaagtcatattaaacacaaaaactatgtaggaaaaaaaaacaaattacaagaattagagatttacctaagcagtaaaaggaacatttgaattacaattttgtgaagataaagataaatgatatttatatcctaaattttattatttttcaaattatctactttttaactaattaaattctcttgaagtttgtgttaaattgaaaattattatacgtatggataaaaaagtaaaaaattatttaaagtacagttttaattggaagtaattaataaaattaaaatcatagccaattaattaatagatatgcatgacaaatgaccaagaagtctttcattgcaatcaagtctttcaataaaagctttaaaaaatagtattttagtcatgttaagaagaagaaaagtttaagaaagaagttgagaaaacattaaatttctgaagggatgataaaattattggtataaaatttgattcttatattataaatttgtaatttccttatgcgagttaattgttttttctgaaatttataaaatgttaattatttgttaaaactatgataaaattaaagagaattgttgagataaaattgttgggataaagttttattaccttatcatgcattaacttgaataattctaattttaatttaataattattaattagtgtataataagataaatttttaatacataatatatttattattaatttatatagagaaaagaaaatgcagacatagaggtgcaataatatatgtgttttcgctagtatataaagagagagatatatcataaaccaatttatatcaaaagtaattcttttaaaattatgtttcatcaatagcattcattttcttgtattaagtcactaatccgttagattctaagataatgaatgataagaatgaagtgcaactctaaaagagatcaattttttcttgatataagttaatctcttcttatatatatatatatatatatatatatatatatatatatatatatatatatatataaaactcaattttttttatactaagagcatttttagtagtaaatctcaaattggaatcttattcactttttggtagactctataatgtcacataggattgaagatatctcgaaatctctctcattctttttagtggtagatctcattttgagattttaaggagagagagaaaaaaattatttttttttgaacgtgtgcatatcttaagggtttttctacaagaactaattctccatgttggagatctcttcatctcttttattgagagagctagtaaaaatcatatcttgagttcaagatccttactcaaaattttgccgtaaaaataatctaatataacattttttttagaggaagtaaaatagaaatttgaaaactttaaaagaataaaaaaaatgttctttttaaattttcttcaatttatagactaaacaatgtcctacaaattcaagaagcaaagtaaacatttactcttattttttgtaccttgctacggttgattctaatgtacattcccatcaaagaaagaaaaaaggtaacgtaggtgcaatgcatgtatccaactcttttccatttttgttttttacttcaactgtattactttttagattgtccccaaatcacatcaattatgttaatacaaatgtattcaaactcaatgattatgtcaataatagtaggttatacatgtggtgtttttacttttctgtcaatttcactttatcaattcggatattggtacaactataatcttctttggtaaactacttaaggcacattatatgtcggaaaattttgacaggaaaaaaattctagccaagtattacctttttatagaaaaaaaaagctaaataatactttaaattttgaataactcaaaagacatacaaacacaaaaaagaaaaagcttttgtaataattatacttcaacttagacttaaataaaaatattaatatcacaaaaaatagaattacaggaaaaaaaatatcatagcgtggttcacctagtaatagcataataaattagctaagtttacttgcttatttgaaaattctatataaaagtttattgaacaaatttaaaatgaaaaataaaatattatagaatgtttatgatctcttaacataaaaacaagcaccctgctaagctaaatttaagagtttaattttgatatattactattgtatagatttttcatttttatttaattaaaatcattttatatttttacatgactttttgagagtagttgttatcaaagtcaataattttattattcatgacaatttattgttggacaacaatatgttttttattatctatatttttacctgagttcaacagatattagaaattagatgagttcaataaataaaaattcttaattatcaatcaactaaaaattagggtgagcaaaaatcaatggcccgaccaaaaaccgagaaatctgccttaaaaataatgttttcagactgttgggctcgagaacttttcaccccaataatacaaaaattaaaaaaatataaataatacaacgaaaaaattatttataaaaataatacattattatttaaagtgagaaattggtttcccccaaacaaatttctctcattcattttattttatttgttcatttttacttgttggagaattgatttcgcgtgttatttttattttatattatgcataatagaagatatttgatataaatattgtatagtgtatgatagagtatgcttaaaaatgatctatatcaaattttaatctttcattcgctatcattcttgttttcttctaagataggaaaaatattaaagaatcatgaaagaagtcaaaatcatatgtataaacatttataagtaaaccaaataaataaaagtaaaggggcaatataaaataagttgatattgtcctttccttttaaaaactcttacaagacaatttgactaaacattaatttttaatttataacaagattcatttatctcgaatagtatttaaataaatgcatatatttaaaaactcaatataaatataaatgatacaaatcattatgcaagccgtttaatattatttttttcattttgacattgtgaaattgatttcccaataaccaatttcataacatatttatttgtttttctttctaaaacgaccttactacacttggggaagccatgtcataaggctttatttaaaatacatttcaaaattgttttttttcattttttaatttgttttttacttatttcaattttttttgtttttttaaaataattttctattgctttgttacattttaatttttttaaaagttttttagttcactaatttatatatatatattaaattataaaaaatttaatttatgtagaatagcaaaattgtatatatatttaaatacttaatataaatataattttgttaaatatgtatgaaaaatacatatatttaagtgatctaattattttacttaaacaaattaaataaataaaatatattcaattttaatagtattttcaaaaaatattattgtagattaattcatatttaagtactcatatttttatatcaatataaattattaaaattgaatatattttatttattttatttttttagacaaaataattagatcacttaaatatatttattttataaatattaaaaaaattatatttatattaagcatttaaatatatgtatttttattatatattattttatataaattatattttttataatttaatatatatatatatatatataaattagtgaactaaaaaaataaaaacaaaaaaacaattattttaaaaaaaaactgtaacaaacaaaatagaaaacaatttaaaaaacaaaaaaaatttaaaaaaatatgtaaccaaaaactataaaattatttaaaaatagaaaaataaattgaaataaataaaattaaaaaaaaacacattttgaactcggtttgaaaaaaaaaatagccttacgacatcaatttctcatgaaccgatgtaatatgatcgttttagaacaaataaataaacacattgtgaaatcgtattgtacatggtataatatttatattaagggttgctatggtgcacgataaaaaaaatatgtaaaattggttcttgctaaaaaaataaaacaaagttgaaaaatcgatttgggaaaactgatttctcgttttaaataattatttatatcatttgtataaataattttttgggttgtattatctgagtaattttttaatttcttttatcattggatgaaaaattcttgggtttggacttcggattcgattaaataaaacaatggttaaaattggataattcggagggatgcgggttagaaaagagtcatccattaatatctgcaccgaccaaacaaagcgtcacacgtaaggacaaggagtttaattttcaaactcacagacgtgttgagtttccttgcagagttgcaggcattcagcattgtgcctttctaattccttttctctcattctcacatgcagtatcatatttttatatcaatgatattgttaacattctttttttcatatatagcaacatttctctttagaagcttcacgaaaaacttcacgaattcttgtgcaaggagactttcatgtatgccctcaatattccagatctgttcatgtgttttatcttcttcatttttttttctcacctccattctctccttcacttcactcattcttgaaggaggctttcacttcctcagttcgtgcttatcattcgccagttctcttccttcttctcaacttctttttttactcaaatccgaccaaacccatccaaatttacctgcaacccaactaatccgtaaccactcaacccgatttgcttccgatgggtcattttaagttcaaatccgacggatgttcacctctactaaaaattatataattttgcagttaaaaataatcatataaatataactttaaagatggttattataaaagtaaatattttttatgaaataaaaattaattaatttattactaatattaatatatatatatatataatgtttttgataaaataaatgtgtgagccttatatagtatgagtaaatagtttctatattgtgtataaagaaattttactttattatattcaatcagaaaaaaagttttatattattatattattatttaattataaattattatgtaagatgaatttactgatttcaataattactattatttaagtgttcatgactactatcttaaaaattattagggcaatatcttttgattaattgatagtgtaatgaatattttaaattatgtattttattatctagacactctcctagtataaggaagaagaatattgaaaatagttttatctttatatagtgtgtaaggttgaatacaacgataacatatttaaatatcaaaaatcatattagaataaggttgaaaagtgtgttagagaaatgtaataactttattacaaatgaaactttttcacaagcatatatgtaaaacacaaaaattgattgtgtcatctagtaataaaaaatagttctaatgaaaacaagagactatcatccaatggaagataaaagagttttcacaaagatttttcaaataaacatttggcgtcggcgacaaagtatgtcaaagtaagcttaagagaatattgattaaatagcttaagagaaacgtagaaatatcttgtttatgttggttcactcaaatagaatcatgtcttgttcatctttaaaaacttgaaaaaggtttcactgatcaagattgattacaaacaaatattctaaattgtcactcttgattataatagtattctataggtcactactgacacattcttagattcttccttaatctaagaatatccaagtattttttggcactaagtgtttttacaaattaaagtttgaatgaatacaatactcaaatagtggataaacaaataagcttaaatacaaataaactttactaggctaaggatgaactatttaagtacatcgtatattgtccaatgatttttttcattttaaagatgtttactcgttttcacttaatattcttcattcttgaaatcttgggcttgaatcaccttttatagacttcactgaatgatccgttatgaaattaatgttgagtcttaaaatgatcattgtctcaactaaaagtgatgcaacatgcactctggttggacaagaaaagcataataatacaaataagtgcacatgcttctctttcatgacgataatgacattgaggaatattcttactaattctttctattttatcttttccttaaattcaaatgtcgatcattcaaataaagagaaacaaaatgtatttgataaagtaacattcatacactttccattctggctaaaacaagctttttgtactccgtgaatgtcacttgtggaggatataaagtgtagtgtttaagtgattaagtctattggatgcgattaaaaataatttgtttatatattaatttcacaataaatggaaatgattattttaactggacattaaatataacttaataaaaatattttgcacttattattggacatgtacttacaaaaactataggatatgaaaaatgtgctggtttatattttagattcaattcatttaataataacttattagtctataaaaaatatattttttaatcatcaaaattaaagatagggattgcatattttgttattcaataattattctttaaaaatttattattcaattttttttcatacattttaccaaatattcttcaatttttttcattatttactaatctgttaaatatgaaatgaagttatgttgtatccttaaaaattacgttgatttgtctctaattttacaaaacgacgtcactcaattactaacacagtagtgaaatatgcaaaaattaaaaaaatacgatgttaaaatatgaagaaaaaaaacttgaatactaaaatacacagaaaaataaaataaaaaatgattgtaaaatgaggaagaaaaaaaaaagcaatagtaaaatattaaaatgatgagagtgaagtgatgaaatgtagaattaacccacattaacaaagaagattctgaataacagtaatagtaacagtaagcaatcattattaaccatcatcatcatcctagttcctagcacaaactttacccaacgattccattcacttccactactactgctcaaaagttatcttccgcaaattccacccattcgattcacattctctctctcaaacctgagaaaacctgctttctcaaacacccatgtggagagggtgaggagcagaagaaaacccttccaatggaaaaactctgaaattagggttttggtttcccccaaagggagagaaggaaaaacgaaagaaggaaggaaggcgggaggggatgatgaaacggctgttgggtgggcccgggacgattagcgggttcctgttgaggttcggccaatgcgccttcggtgccgcttcgattgctattatggtcacttcctttggcttctctagctacaccgctttctggtattccgctagtttctctctctctctctctctctctctctctctctctctctctctctctctcttctttaaaaataaagttaaattaaatttaaattgatgcttgggtttgcatagggcgtgtttggatggggggtggggggtggggggaagggttagtgtttcatttctagattgaggaacttttttacggaaatgagtaagggaccttttgggggaatgttacctgaagatctcagttttttgggtttgcttcaaaacatggctttagtaaaccgtcacgattggttgtggttttgttacgatctttgatattgcggaaaactgcgaacaaatatggatgatgcggtcacaatggcggagatttcaaaaaccatttagttgcggaagtttctaagctttggcctttagtacctggaaatcagatagtgataacagcacttgggtgtaaccgtaagtggtgtgggtatcaaacaaaatagaaggggtaagtgaaaatggaattttcaattgaaggatgtggtggggtcctattgaatatgggcgtggaaaattcaagggtggacttagtgtgagaattagcttgaaaaactttttttttttcttaaaaagaagatgattttccctaattttaaaggggttatgaactgattcttaccagtgaaaatgagttacacttgttttaaagacggtgtttgttgctttgttcgttccaaatttttcacgtttctctttttccacctactgaattgaccacgtgtgtttggatgggcattgacaaaattgatttgagttaaaattgattttgaagtgatgtgatttatgtttagatgttttattatagaatcaacttaggagtaaaattcagtacagaattttggatctagtcaaaagctaatcaaagttgcttcaatccagaatcaattatgaattcttctccaacatgaaaccgaacatgtgaaaattatttgaaaatcaattatggacccaaaatcaattccctaacaccaaaccaaacatgcaccacatctgttcagacagatctcttggaggacgccaaataattatagggagagtaaactgacccagacaagtaaatgaaattacaagaacatagggttgaagatgtgttagatttcagtctagaatgtagataggttatgatgatgagggctcttgaattaactgtgtttaaggctcgtttatagctcctcaaattatccctccatttttactaggttctaggtgcatgaacttgattcaaccaggatgatacacaagcccccagctcagccctctttggagggtacaaagtcctctatggcattgagaaactttcatagacattttgatgtttactgcattgtggactaattggttcttttttagcaagatgattctgatgtgcttaaaaggggaagaaataaattagtgtccaatcaggcaactaattgagctgtgtcagaatgtataaaagagatgcattctgtgtattatttttagttcttagtttaaatagaatataacccatgatggcttttactatttctcaaatctttgctggtgtgggtaaacagcttaattaagcatttgttcaataagccattatctcatgagagcttatgtcagaaatttgaccatgaaacttgttgaaatgaactataaatagcttatttttaataaactttatcatggaacttattgaaatcagaatcagctaaattataggagttatgagccattttcataagctcaaacaaactcaataagatcttttaacacaccctaatattaatctatttcttgtttcatggtttaaggtaacgttgaaagtttgagtgaaccagatctaaactaaggttatgtttggaatcagctaaaattggaaatgactcgattttagttaatttgattcagaaatcaaattttatgtttggaaatcatcaagagtgagatttgaatttattagaaaatcaaatagcttggaactcatcaatgtggaaatcaaattgatttgattacattttattattttacttataagtggtaggctaaaaagttaataaggcaaaaatagtttatttatttaaaaacaaaatccaatcttgctaatttgataggatttctacattaaaatgaataaaatctatggaatttcacttatcaaatcagttcatattttttaacatccatttttaatgtttccaaacacaaaaggaggataaaattttttgaacttcactatatggtgttgttttttgcagtttaaaaaatgtcatctctcatatcttgtatcgtgttaagattgtaagagcttcactacattatgcatgacatttttgaactatggtatgattgttcatgcttgtagtaagttagaatttagaaacaagtttaggcctgtttgtatttttaattcttctagaattttctaggttgaggtgtcaaaatgagtttcagctgcccatggaccattcctttggcttatggactagtcatttaaccctgtaaatggggtgggctggataaaaattttggaaacctatttagcatgtagccatgtcagcggtgagcttttgagtccttgaagccccattacaccagggaggattgtggtgagctggcatcgaccccaaccacattttcatctctaaatcaatctctattatgtattatgagaggtgctttttcaattcaattagtagtgttcttatcaaatatatctttacccatcttgaagatgtccagattcttatttgcactagaaattattttgattattttgttttgttccaaatccttatggtatggtgatgattttctatatttatatatatgcttagttgagtattttgaaattgagcaatgaatgagtgtaaatttagccttaacccttgagattcgagaattcttaggggtatggtctaatgggaataagaggaattgattgcttattcctgccagaacagtttggttaaatttagtgagaggactactttgttgtgtataacatgctaatggttttgtttatttttgtgtgtgtataccatgggcattgttgtaatttgcaagtagtgtttaagtcatttgttcactgcactggattctcagatagcattgtttactacttaaatgtttttttcttttgctattctattaagtagaaagtgattcctttatttttttttattttttgtcttaaatagatttcatattttcttgtaaacgtaactctctggttcttccctgcatcttcagctatttaattgcatcaatgggacttcaagtgctctggagctttggacttgcatgccttgatatttatgctttgaggagaaagagagacctacaaaatccaattcttgtcagcctgtttgttgttggtgattgggtaataatcatgccactttccttatctttttcctattttcatgtggaaaaataatttcagaggacaataacgtgcttaaacataatcatcagttcatcacttaattgaacataaattcaatttttatggttggtagttactaaatacttgagaaattaaaaatactcgctggagttaaatatttctcttacagaaaaatgctaattataaagtgtgaatgtctctgtcttaaattgtgtgagctcctattttttgaacagcatctaataaaataatgaatacctgccaattacaacttcatgttactgtcaggtatgtaaacataatgtgcttctaaaagaatagtcaaaatttaatattgaacttcatttgctcctctattgaccatgtactaattcagaatggtgtttctctatttggtttatcttgttaaccttaaaaactttggtgaagtattgacaagatcttgggcttcgatttctgcattatacgttgtaataatgatggaattggaatcaatatttccctattcttctatggcgcaattgtttttatattttgatgaaaattgaggtgattagcctggtgagatcatatcatagtgatttatgaaatgcaggtaacagcgactttgtcacttgccgctgcatgctcatcagcaggaatcgtagtattatacacaagggacctgactgtatgtgcgactagtaagcgtctcacgtgcaacaggtaccaggtttctgtagccatggcttttctcacctgggttcttacagcaatgtcatcgcatgtgatgttctggatcttggcctcagtctagcttgacttattttctttgctagatacaagagaccaacatagatatcaccctatctttgatagctcttgtaaattttgatgtatcattacctgtcatgacatgtgggcaaaattttccctcttgtcccttctcaaaactttgattgatttttcatttttcaatcttgccacgcacgcctttctaagtctagatatagattctggtttaatgtaagccttggacatgatctgtaaacttccttattgtagccaagatgttctctttgtgctgggtgcatgcggttgtatatattcttgtttttttctttcttcgtttatgtctacaatgacggcattgaaaattaaacctaaatcttcaggcatttactaaattcctatcactaggccgaccctagtggggttgtatatattcttatttactgcctgtaaaacattagtcacgttactataatttagaatttagcatatatacaaattacatatatagtctttcacttagattgagttatttttaggttttattgcaattttgtcctcaattttttttttgttgaaatttacctcaacaaataaatttggtgtattttatttttaatttttaagaaatttgtgaattttactcattatttattcattaataaacacaaaatgagggtaaaatttatcaaaaaaaaagttagagataaaatttgttaaaaaataaaaaagttggatgtaaaacctgtccaaaaaaaaataaaaatttgggggtttaaaaagtgttattatgataagattaaattgaagaaggataaaatttataagtttcttgaaagtttaagataaaatgtgataaattaatttattgggattaaaatttatcaaaaattgaaaagttgggaggaaaaaatataattaagccttgtttttaatgcttgaaaagtataggataaaatttggcatctatggaatatatgctttcaaacatttcgttattgcatatttgcatgcatcgttctatgacaacaaataatgtataattccaaggtttgcacttcgtcttggacaaaataatgtgctgggctagtagcatcaaacacagtccatatgtgtaacttacacccatctccgttctccctgtgtggcattgtaatattcaatttatctgcatctcaccaccttaatagttagtagttatcggataggtttcattagataaagacataaagtacacaatcttgctctttgtctttgtttcacttaattgtattcaattccacatgattgaacttgtatcttaaaatacgatttcttaacacaatatcacacttattaattatttttaggataaattatgttttaggtctctttaaaatcactaatatttgaatttgatttctctaaaatttttagtaactcttattttttatatgtatttttttttctggttctagacgctatttaagtcattttttttaattattgtataaagtgttatttaaaacattttaaggaccaaaagtcatacatttcaaatttaaagagaaaaaatattttaaaattagagaaataaaaataatatgaaaaattttagagggacaaatttgaatattagtcattttagagggacacgaaccatatttagcccttatttttactatttatttctctcacgttagtttgccatatataaatgtcacctaaagggtatattccctacttatatataaggaccattccctacttgaattcactttcgccttaatgaacgtggaccctaattagaagttgcattaagtaaaaagaccataataaattctaacactaatcagacatttcctccttcctcgacatcatggttccatatcatgcttaaatgctttcttccaaatcctttttttttttttttttgtgggctccattagccttgcgttgtgatcacattttgttcctatatgattccacttgtgtgcgttaaaatcgttcctcagtcctcattggtcattgcactgttccatgctaacaaaataacgtatttcttttagaagaacaaaataatgtatttcttttaccttgcatccaggaaaaaaaatattattctcaagtttacacttcttcaaggactaaataaatattattagtccccgtccgtccccaatacacctcataattttcaaaatttcatatacttttaaaataagtaaatgtctataatatggttacatacccataaatgtttatctaaaattttatctgcataataagatactattcttgtaaaaaataatattatacaatttattatatgacttgctctccatctctctcttttattgtacaatgatgataatgaaaaaatcgaacttaaatctttacgtatttaccttaatttcttacaaataagtcaattttaacaatgtgtattttcattcacatattcaacaccatttcattattttagaaccaaacatgctattaatcgttgtagaatttttaaatttgtattctatgtcaggttaaatgtttaagattttttctcagaagaaatggatcccttatcatattattagaaaatataaagtttatactataagatatgatccatgcttaaggtatgtttgaccaacttttttttaacttaaagtagcttttaagttaaagttagaaacaagaacttaaaaaaataagtagagttgtttgtcaaatttcattttcttttagcttataagcatcttttaagctaaaagttgtttgataatttttttaaaaaaacttttttgacccaacttatcctttttaggaagaaaaaaaaaactaaaaaaaacaaggccaaacactaccctaaggctaaaatcattttaggtaaaaactttctataaatttattaggttaaaataagttttagtctctataaaatttaccatgtttaatttatatttgtataaaaataagtgaaattgatccttgggatcagtgttataaaatttggtctagtcattgatccaatcgaggtagtggatcactggatcagtggtccaactgacggactgataattggtccgatttgaccaggtttatataaaaaaattcaaaattatattatatatatgtatataactaacattatttgattaaaaaatgaaaatggaaactgcagaaagtaataaaagggtacagaaagaaccaatctggatctaacgaggcccaaataaacaaaaaccctaatagccaattatatatattcttctcttccttcctgcttcagcttctcttccttcatgctacgacttctctcataaagtgcgtccttcaggcttcaaaggattaaagaaaggtgatagcattagtattaaaaaaaaactctttctctctctctctctctctctcactctttctctctttcattcccaagttgaaactgctggaaaacgcagcatcgccgaagcaaagatcagaaaacacaatcggagcaccaaatacgaagcgtgcacgctctgaaagatccgaagctgcgtcgcaccgccaataataactactctgaagtgctccttgaagccatcgcaatgttcggactcatcggctttctccgccagcttgacgacctcgctcagtcagtttgtcgtcgctcctcgaagcatgatcgtgaaggaggcctttacgctctcaaacaaagcccttttttctgtcaaaacccaatccaggttctaaaaatcgaccgggtcgccgggttctcataaaatcgactgggtttcattgggcgaaatcgtgccaaatgcatggtcgacccaagtcccaacttggcccacgtatagcaccggttctcggtccgatcggccgggccagactggttttcacaacattgcttgggataattagagcatctctttgatgtggctaatggaatccaatgttagcacaaagacattcttcttcaatttctcaatagttgcgtggttttactccacaccatgcatactttctttttttccttttctttttttatacaatctacaacatgcatacttgactcatcatccaacaacttatcacatcactcgggaagtaataattgcaattaggttctacccgtagaaaacaagagaataaaatcataacacacaagtagtagagatggattttaactacttgtgataattagcaagtgtaattccttttcaattgcgacatttttaataaaggaggtgaagagatttccaacatatagaatgagttcttgtagaagaactctgaagatgtgcacattgttcaaaaaagaataattttttttcctttccttctctccctaagatttcaaaatgagatctaccactaaagaaaaaaaatgggagatctttaatcctacctggcactatgtgatccaccaaaaagtgatctaagattccaatttaagatctaccactaaagatactcttaaaattcttttaggatttttagaactctccaaagtcaagaagggatacttcaccaatcacgagaaccacacaagagcttttctaacctattattccatgtataggttcatgaaatcaaacaaccaacctatccaaatcatgtcaccaatagtgcaagaaccactatctccaaaacatattctcaaaccacaagcaccagggattgcaaatttagggtcaggttgtttgttagggatgtaagtaattttttttaagtatagaacttagaaagtttattgaagtcgaatggaatttaagagcataatattgatgttatattcaattactaattgaaaaggatgtaattggttaaggtttgatgacatcatcaaatgaagattgaaagataaagattagttctaaagataaattgttaagacacatgctccttgaaaaaagataaatgaagaatcataaaaacacaccattttgagcaagcatacaaatacaaataacattttttccacaaagagtgcgaagatacaagtgttaacattttagataattaattcaaataagttgtacacttgtacaaatcttataaacaattattagtggtttttatttgtaattagtagggactaaaacaaaatttactaatttattagagagtaaatacaaaatttgctaaattattagggaccaaaataaaatatcaaggataaaaaattattattttattagaaagtcaacataaaacaaatttattaagaaataaacacaaaaattaagtatttattaaggattaaaaacatatttaactaataattttcataaaaaaaacaacttacttaagtagtttattatgaaaattacattgttcccacacatgacataatcgcataatcaaagaaacaatcataaagctgacaaagaaatatatgtattttttgtttaatattatatatatatatatatatagtgttattgttctaaaatagtgatgattagttaattacgtaaagaagaatttgaattttgatctagcatacgtagaggaagatcaagattattggagtaaacagtttcaaatcaatcaagaagctaaaatcaacaggatattaatcatcacaagcacaaatttaaagtgaaattaggatattatacaatgagccagcctgagaagactatttccctttgtacacgccatcatccaccaaacctgatatatttatatagttgaaacatttttttatgcaaatcttgttagatgataatgacccaaaggtttgacaagatagtttcaacatattcctcaaataatatactctcattttgcctcttatgacgtgcacagaaatttagtctattcccttaaccctatttatttttatgaacaattctcatagaatcatacttcaaatggcaataaaatctaataaaaatcctacccagaaaacggagaaaaaataaaatcaaaactcaaataaaacgaacgaacaattgcaatctaattattctacaaagtcacagtttccatgaccccccattaggtcaagaaatacacccattcacttgacattccacccccccaaaagaacacagtataaatgaccctttggccatgaaacacataaattttgataaacatcatgacaaatatttacaattgcaaaatacaaccatgcaagcatagtactcctttggttatccacatgcttgcaagtgcaacacaaggtcccagacttgaaccatttgaaaagacaaacttgaatacttaaacaacacaagcagcaatcacattcttgtactagaacatgctggtctagaagttcatgttggagatctaggtgaattcatgcgacggtgcggcgattgaacactggaagaaactatgatttgggttgaagaagaagtagcaagtttggaagatggtgaagaagcagaaaacccatagtctgacccaaacagagaagaagcagaggtttgaaaccgacctgagtcgccgggaagtttcatgtatgagtaagaaggtgactcacaaagccatgaaccaataggcccttgtttctcattcttgtattgcattacagctttgtacacaaatggaattagaccctccatttttatgtgtgatgatgaggaaaaaacagagaagaaacagaagaaaacagagcaaaaacagagaaagtgaaagattttgggggagttgatttgtgaattggattgaaggtgaaaggagaatagagaggttcttgggtttaaaggtgtgggatggtatgtatgatgacgtggagtaatagcatgtattggagtccaactctacacgttaagccaagaagatttcaactcaaacccacaaggatatcttcaaagctatgtgccaaaaacaaaacatgttattgaaatcattttgtgttgatcccagtttttttttttattattttattggtttggtttgatgtcatggggtttgagcttttagaaaaaggttggttggtttgatatgaattttaatttgttccatcacttggtttggatttcatctcaaattaaggattcatcaataactaatgatttttttttataacagtgtgaattagtattcaaattctagatcactttagtaaaagacataaatagttattattgtaccaactattgttatgaccaccgatttcaattttcattatacttattttttgttttttcttctctctcattttaatgctatcttagtcactatggttggttcagatgttggtttaaagtatgctacgtgataaactattattttgttcattcttatagggccagttgtatccgtgtacgagttttgggtataagattttatgaatcatattcatgtcttgcacattaccgacgccaaaataatggcgcaacgcataaagatccgatttgtgtgtatgataattattatagatgtatagtgatgttattctcgcaactaacgcttaaaatcaaaaggtttctgatgctttgattgaatccaacaaatacccattaaaattctatatttttattctatgagtgccactaacacgtgctttctacatctcatcaattttaccaccaagcagtagagaagtacagcttaattgagattgaaaaaacattatatggagtgctgagatttgtgacctgtgtgtgtttttctaagaatcttaaaaaataaaaaatattggattatcaaacacaccaccaaattattggtttgagttaatttaagttcaattatttaaaataaaatttcgagtttgaatcgtattaacaaataaaactgattaatattttgcattaatattatgatgaaaaaaaatattatgcataaattttttcacttatttaagttttatcaatgtggttaaagtatttttttataaagagtaaataataaatgtagtgacaatataaacaaaaatacattatcatctaataattttttattgattaaccatattttttttttttatcttaactatacatagaaattaaaatattttattccataaaaagaaattaaactattttataaatactctttaaatgggtatttaaattatgaatagatctcggggtcgtggagatttcttgtctcattattttacaacagtttctttcttcacagggtcccttacgctcttttctatattcaaggggagacatgtcaaagtttattaataccctatttgatgagaaaagtatgtagggccaagattaaaattttcttccgagctttactattattaatctttaaagtttttgttcattagtgtaaaagttaatatacacaatgtaatagctaacgttattttcgtctttgaaaagtacacctaaaaaaacaacacctcggtataactaaaatatttatatattgacaaatttatcctagttacctggtaaaaatgatatcaaccctacaatagagaattatattagacaaaaaatttgttaaaatcaagtcgatacaagttattaatttacaaactaaattgtatatagagaaagaattgtatattaactctttgccttcatatattattactatttgggtgtgatacactttagactgtcataagtatatcatggtaggcattactataatgaaggtcaaaatataattaaataataaatataaaatcacatattttattaaaatataatttggttcttaattttttattttaaagattttatcgtctattaattttatatattatttgaattataatgtatttcatatatgcgttatttaaaaatatacaaataaattgaatttagaaaaataaaaaaggagaggtgaagtagatatcccagtgccatcccaaattttataaaattatttaaggacatgaactttcgtgcagcaaagcaacttacgtgttattcgccatggaaaatgtttgatttttctcttctccttataaaatcaatgttttttcttttaattttcaattttttttatctatagacaatcttactcaagtcagtaagagactactaccaataataaaactcttttaatattttatataactatataaaacaactcgattttgatctttgtaaaaaaaaaaaacaacaactcgaatttgatattttaattaagataagataaccttattttaatgtatgcttgccctcagttgcatgatctgtaataaactatatttttgttttgttaatatttttaaaattacagtttactatctttttagtgcttaaattttttaatatttttgtttttagtcctgaagttttctttgatcaatttttagttttttttaaaaatttttatcttgatttttagttctttaacttttttttctgtatttacgtttagttcttttaaaaaaaattaaaagtaaagatgaagaaaaaattaaaaaaactaaaagtaagaatgaaagaaaattaaaatactaaaaacatactcaaaagattcagaaataaaaataaaaatattaaaaaatttaagaactaaaaagatagtttatccttaagattattacatgtatctggatatcacacattcaattaatttatatatttctaaccgagtagaaaattagaatagtttcttatgcagtttgtttttatctagagaaatagaatattttactataaggaggcttgacaaatctttattttttatttttttaaaaaattgtatataccatgcttgcttcatccaaataccaactagtactccaccgtccaaatcataaaataaaatcaagggttgcatcatgaggagaaccgtaggcttaaaaaaattggattaatgagacaattaatgtcattttcttcccgcaataaattgtaagtttcaaaatgatcatcaattccctttaatataatataattaatcaaatgccacaaactgcgtgcatcttagttttgtgggatgagttaggtgaagatggaagaatagggcttcgtggtgtgaaagtctagtctaacgtaaatttggctctcgaacttaccttggaaaacaacaaagtaaacaacgtgcaggtaacatcaacttttgcacagtatcaatccatcgcctatttgtatacgtcaaagttcatgcaccgcacaacctttttccctttcagtcagtttcctcaccaacaaagaataggatgttgattatatccacgatattttccttccaatataatctcaacccttgtttttaaataattcataaaaatattttcctcattttttttaaaagaaaaaagtagcgattattttaaattaatttcgatatagagttagtgtaaaactttttagtgtattgagtttaactaaatttgtaatgtattgtatgatttcatttgtaatggctttcgggcggacctttcaggatctagttattttagtggcttttagctttatctcttttcatgtttttaacaagaaaaaaaaacatatataaataataggaggatcacgtataaaatatgagtggacttcaaaaaaaaaaaaaatctatgaaaaaaagagttaattacaaagacatcccttgagatttcaagttattacacttgatactcctccattcttcaacattattttatccctttgtggtcaaccgcatcttgttccattagtattttaatatatattttaaataacaaataaaatcaaattaaaaaatatgttattccataattatcctctcatttaacaagtgcaatttagggttgagaaaacatttcttatgttttagagatggggatggagatgaactagtgcccctgttgttgagcgaggggtcagaagcacaaccttaaacttcggctaagccagattttaggccgactttgtaggcgaagacacatcatggtggtaattgaggtcaaggtggacgacatcgaggtggtggtagcccttcttccagtcggccttaaggtccatggttttctgggcttcgcataattctcgagggaagcatgagcaacagatgattggaagagggcaatggtgacaagtttcctttgcctttggtttctgcaaccattgatttgaataattagccattttggtatatttcttcaggggttaattttgtggaatgcttagtgttatggtgtgggacacgaagtgtgatttagattatgcaacacattatatgttgagaaaataagagaaaacaagagagagaaactagagtgagagggagataaattagagagagagagaatttgtgaatactcatagtattgagttgtgtgttgtgtaaatatgcatacatggtacatatttataatgtttgccttcatggcattatcatccaagacattcactctaaaatactcccttggttcctttgggttaacttgtgtgttttccgaaaatgatccactcccattctcagacagaatttgcaagctgtccaacttaaatttcaagatttttaatggaagcatcagtgttattttgatttgtgatggacatctgcataaactgagttagagtatcttccatttttgacattctattaggctgaggttgttgttattgtggttgacccctatttgaaggacctacataagagttgttagaaggacctgcataagaagagttagtgaaaccataattgaaaacaatgagaatacacacaataaccaagagggggtgaattggtttacacttggcctttttaaaatctttagaaaatcagagttaaaggatctttatcactaataaaccaagaatgcttcaatcaatcaaattactcagcccaagaaaacaattacaaaaacactacttgttgagtaataaagaattcaccaagaaccacaaattaagataacttgaagagattaaaaaaaagtaatcaacacaaatttatactggttcacatctcaacaagagaagttacatccagtttcttctaatcaaaactagattaaagttccactattcacaaatttcaattcttataagctttacaacaattatcctttatcaaacctagataaagaatatgaatctaaaaccctattagactcttagtgatcaagacatagagaacccttctctattctttccctctagagaaacccactctagaaaaagcctcaagaacccttgtaatagttacaaacaaccaaaattctaaaaacgaatttacaaccaaagttaaaggagagagacaacctgatgatccaatgaatatgatttaccaatcagagttgaaatgaaaaacaagtttcagaacttcttctccaaaagcctttttttttttttaaaaaaaatcttgcccaagaaatctttcaatacaacatgaagatttgaatatgtgggacaagaactttagaactcagaatatcctttctcactttcaaaagacttatgaaaactttgaaaatttcgtagagtattgtgttgtaagttttagaaaactcatcagatatttataacaaacttttgtaactgattgtaatcaattaaatcgcccaagcaattgattaaatcttcatttgtaatcgattaaaaacaaacttaattgattaaaatgttcttcaattttctggaaaggatatataaataaagtaatcgattatttcgacctgtaatcgattactacatggattcttcttttcaaaaatgaactaagtaatcaattacagataagaggtaatcgattattatagtcaagtcatgttctgtatttttactgatcaactaagtaatcgattacttagtggctataattgattaaaatgttctttaccacttaactaatagattaccaatatgtggtaatcgattaacacagttcaaaaatgtttttccaaaaacttaaatcataaaaccttgactttgatgcaatcatgaaatcttaaacctttttcacaaaccatgtgtttttgtaaaatcatgaatgcaagtaaatgaatgtttatgcaatgcaaggatcatatgatgattctctcctacatcaagaaattacaaatgccttcaattgaatgacatgtacaaagctaaaacactcattcatctttagcatgtatcataatccaccttcatgctccccctgtatctaataataatatgaattattattttgctacctccaaccataaggctgatttgaacctggaccacccttgtagccttggtaatttcgttgaaagttctgttgaggtctgatttgattatccaaataatgagcctcatcttcctgttggcaatcaccaggtgctgaacagtgtccattttgatggtcaccgccacaaaaatcacatcttagaacttgttgaacttgatgagcttggtgtgttttctgtgatccacgacctatctatttttttaaggcctctatttgctgagtcaagagtttattttgagctagaattgcattctaagtatccaactctattataccttttcactgaaccagagacctatcatggtgactttaataatcattggctattatggagtcaatgattacaattgctttctcagggctcttagacatcatagtacctgtagctgaggcatcaagaatcatctttgtctgaggtctcaaaccactctagaaaatatgtagttgtgcaacatcattaaaaattatggtttaggcacctccgcagtaaagatttgaatttctcccatgtctcatagagaggttcattagacccttgggaaaaagtagcaatggctgattttgcactaatgaatctggatggaggaaagaatctcgcaatgaattttttctccacttcttcccaagtgtgagacttttgtttgaatgtgattggagccatgtctttgctttacctgtcaaggagaacgggaaagcgctgaggtagacaacttcaacatcttcatcaaaagcttccatggtactacatagctccattaaggtagacaaatgtgtgtaaggatcttcatgatccattctaacaaaagggtgtgaaccaatcagactgagcaatcctggcttcaattccacaaccttgttactgaaaggaggaatgactatgctgttgtaatgctttggtccttgttgataagcatagtcaacaagattcctccttggtgatctatttccttctcctcctctatcagccataatatcaattataagtggcttttctagtgaaggagaatcaatagaagaagattcacccagtggcttaatggttgcttgtttctttttcttcatgttcttcctttcagtcttggtaatttccagatcaattagtgatttatctacatgaattttacctcacataaagtaaaaataacaaactacaataaatcataagtatcgaggttagcgaaaataaaatatataaagagagaatttataaaaaattaaaaacaaaataaataactaaagtaaggaaaatgacctattaaactgaaaattaaatccaaaagaactaagtgagcgactcaagttcctgacaatggcgccagaaacttgttagactactggcaagcgtaccaattgaaaacagtatgaacacacacaataaccaagaagagggtgaattggttaaaatttggtcttttaaaaatctttaaagaatcagagtaatcaagatcatattacaattgaaccaagaatgttccaaccaatcaaatcactcagctcaaaaaaacaatcacaaaactttgacttgttgaataacaaagatagcaccaaagaatcatagattaagacaacaagaaaatattaaaggaagtagtcaacacaatggtttatactggttcacttctcaccttgagaagttacatccatttcttccaaccacaatggttagagttccactaataacaaaaatattcttacaagctttttacacaatcactcttaatcagacctagattaagaacgagacttctaacaccttagaatctctgtgatccaagacatagagatcacccacctctacttttatcccctaagaacacctatcctagtaaaactctaagaaatgaattgtaatagttacaaacaagttaaaattctaaaatgaattacaaacaaagtttgaatggagagagacaacctgatgatccaatgttgataaatgcagatgattacttatcttcaaccaaggttgaatgaaaacaaattcattgcattctctccaagaacttctttagaatcttgcccaaaaataaatctttcaaagtaacatgaagatttagaatttgtggggcaaaagctcattggcttagagtatctcttctcacttcagaaagcttttctaaatctatgaaattttcgttgtgtaatattgtatcttagttgaaacatccaacaactatttgtagaaaactgttgtaactatcagtaatcgattaaaacgctaatgtaatcgattaattttacttattaatcgattattaacacattcaattgattaaagtgttcttgagctttctagaaaagatatatgaacaaagtaatcgattatcacatacagtcttgtttccaaaaacatgccaagtaatcgattaccacaaatcataatagattaacataggaagacttttctgtgactttttgaagtgtaatcgattaccattctattgtaatcgattaaagtgttcttgaaagcttaagtaatagattaccacaagttggtaatcgattaaagtagagaaaaaatgtttttctaaaaccttaaactttgaacactttggcttttatgcaatcatgtaaaccatttgtttcaaaaaagctttttcaataagacttatgcttttatgaaaacatgaatgcaaaaacttatgaatggtgttaatgtaatgcaatggattataggatgacttacttagacatctaatgattacatatgccttcaattgaatgacatgcaaaagctaaaacatattcatgcctaagagcctcaacatcttgatcttttcaagctccccctgtatcttggttttaaagttgtctcctatattgccttctcttattatctttcctttattgttgtctccataagtggaaaatcctccatcctttaaattcagatttgtaagcatggacttcaggacttgtcacccatcatgtgtctagagcatccactgtctaagtaccataatgatgatttagctctaagacacgcctacaacaatcaaattatgtagcaaaaaaaggtacctgatatcacgttgtcgacacgcaccaaaacaatttaactacgttaatcctgtagcacatgattaacctaggtctattcagagacacaatcaatatggttctagcttcaatttacgaataacagtgagggggggattttatcaaacagtttgtgtgcgtaagtaaaacttgcaaaaacgtaaactaaaattaaagagcaacacagaaactaacagaattcaaaagaagtaatgtcaaacagaattaaagcatcaatcaaattcacctcaccaagcaattcgaatcatcattgttctcagaaatttatcctattgtgaaagttcattcaatctcattagaagcaactcaatcgacttaacccctaaattgattgcaaccacaaccctaactgaaatatcatccaattaatctgtgattaatattcaaaattaggaaatgaatccataacctaatccgttttcaatcctaaacatattcataatcatgaaaacagaatagcaattgaagaagaagatgaacattcacataggattcgaaatactaaaccagaacacaaattctccttgtgcttgggttggatccttgaattgattgaggatttagccttccatgatcatcatcagtgaaagccccatggaattattacatgagaatggaagaacagaaaaacgaaaatgaagaacaatgaagaacaagcaagaacagttgagagaaaatgaagaacaagcaagaacagttgagagaaaatgaagaacaagggtttgattctaaaaactaaagaaaagaaatataaaacttgtttattgaaatgtaaagagtgctgctcaagtttcactaaagtcactaatatatggagtgactgagttctgaaaataaaatgggccacaaacaaatccaacaatctaattatttgctatttacaaccatgaaagtcaaattcgcagcccaaaattacaagtgcagaggtgctaacttccaagcttaaaatgaccctctaaatgacagaattggcctcggactatttctagcaaacttgtagatctttttgttatctttccagggactcctagaaagctccattcggagatcggtagcaccctataggtcttacacaagtcagatacgtcaagtgagcaaaaatccaaaaatacgcaacaattagcaattaagcccacttacttgcctaggccaaaaactgaattagaataggaaaataaaggtctaagagaggtcaaataaactaagaaggatagaaaaatactcaactaaaagcactctatcagtacccaattaaggttgagtccataggggttagctatttttctctttttctttgaaacctagatacagtctccattaggcacatagaaccttctagcataacacttatgagatgtgtggccttccttcatgcagtaatgacatataacaaattttgatcttcctttaaaatgagtcaatttggtatgttgtgtctttgaaaatcctttttgtttcatctgttttggaggtacaaacttggtgtttctgaaaggtttatgaacaaggcacacatatttttcaatggatcataacaatgcacaaaagtgagagagatgaaagatggaagaatgatgttgacgtaacaaacaatccatgaaaacatgatcacaaagcacaaagtgaaaaagtagtcaagtttagaatcaagaatgcatcaaggtgatagaattctctcaaagggtggcactcaacctcacatgatgtgtatggcttgtatttacactcaaacaccacatgcaactagcacatccaagcattgacaaacctttcattcattcaacttgaaatacacatgcatcaaaagatcaaaaggactttattagcttgtaatgaatggcttagggaaaggtggataagaaaaagatatttaggttaaagcttaagagaaaatagggacaatggggagcaagccaacaagataaaagaagggtagaagcaaggtgcaatttaaaagaatttacaaggatgaaaatgaactataacaacttttattgcatatatatttttttctttgcttgaacttctttttctttgattatacacaatttttttctacttttcttctttttcttcttttctttgaacttttgctatttgaactctttcttttctctttttcttttcttttccttcaaaacaaaacaaaagacaaacaccccacacttgtttgaaactcactcccaaaacaattccaaagccccttttctccctaaagctagggtaacatggttttccatcatttttttttttagtttttaatgagctaaccaagaaagaaaaggctaaaggctcaaagagggtgacaatggatatcaacacaaggataggcttatttgcctagtagataaaagaaagaaggcctaaatcatttcaatcaaagcatgtgcaacaaggaatgtcaaaagaggcaaggcaaaacatagagtaatctagcacaacggtgaaatcacacatgaaagaacatattcacaaaggcttaaaaactcacaaggcataaatctaccacacatggtttctcttaaattctattctcaagcctacttatcacttcaacaattgcaataatgattcacatcaagtatgaaacctctcaatccaaccaacttttaacatttctcacaatttatacaagttggaaatcttatgaaaaacatgaaaaagtgcctaaattcaataaaaacagtaacaaaacagaaacagcagaaacagacaacaaaaacatacagactcaaaaactgaaacagacaaacagaatacagacagacaaatgaaaacaaaaaacaacagacaatgataaacaggtagcaacaaaacataaacagacagaaaacagaaaacagaaaataaccagagtttcaaaaattttaaggatccttcaccccccacttgaaatgcacattgtcctcaatgtaagcatgcaaagaaatgcaacaaagagacaacaaataaaagaagggagaatgaaactctccaaatgtcgttcaagacacatcttcacacaaaattggcaagaccaaagagatgtcctccacaagctcttgctccacttgagggctttcatgaaatgctttgagttggtgaccattgaccttgaagactttgctggtagcttcatttttaatctcaattgcaccatggggaaaaacattagtaataacaaaaggtccatcccatctaaatcgaagtttaccgaaaataagcttaaggtgagaattaaacaataacactttttggccactatggaactcctttctaagaatcctagagtcatggaatttcttcactttctccttgtaaatcttggagttctcataggcttccatacgaatctcctcaagctcttgtaactgaagcttcctttgcatacccgcttcatcaaatgccatgttacaactctttaccgcccaataagcatggtgctcaatcttcactggaaggtggcatgccttaccgaaaaccaccctatagggagacatccccaaaggtgtgcggtaagcggtcctatgagcccataaaacatcctcaagaagcttgctccaatctttcatgtttggttgtaccaccttctgtaacacttgcttgatctttgtgttaaaaacctccgcttgcccattagtttggggatgataagctgtagcaactctatgcacaaccccatacttctgaagcaaggatgcgaatgaccagttacagaaatggctcccctggtcactgataatggctttaggcacaccaaacctgcaaaaaatgttggatctcacaaaatccacaacaactttagaatcattagttctagtggccttagcctcaacccatctagaaacataatcaacagcaagcaaaatatatgaaaaaccatgagaaacaggaaatggacccataaaatcaataccccagacatcaaaaatctcacagaaaataatgggttgctgaggcatctcatgtctatgtgtaattgtgcctcctgctctctgacattgctcacaagtggtggtaaagtgaagatcatctctaaacaaggtgggccagaagaatccacagtctaataccctcctagcggtcctctgaggaccaaaatgacctccggtaggtgtgccatgacaaaactgaaaaatagactgaatttcacggtcaggcacacaccttcggatcacttggtcactaccaaacctccacaaataaggatcatcccaaacataatatttagcatcactcttaagtttaactatttgggacctagatgcattaggtggaacaacagatgcaacaaggaaattaacaatatcagcaaaccaaggtgtgacatgcgatgaatgcaaatgcatcaagtgctcatcaggaaagttatcacgaatgggaaaggactcaaaaggtccctcaatcctgctcaagtgatcagcaaccaagttttctgcaccacttctgtctttaatctcaatgtcaaattcctgaagaagaagaatccacctgatcaatcttggtttagcatcaggcttcttcaataggtatttcaaagctgcatggtcagtaaagacagtgatatgggagcaaagcaagtaggatctaaatttatctaaagcaaaaacaatagccaaaagctccttctcagtggtggtgtagttaacttgggttgcatccaaggtgcgtgaagcataagcaatgacatgggatagtttaccaactctttgggataacacagccccaagtgcataattagaggcatcacacatcagctcaaagggaagctcccaatttggcggctgcatgatgggagaggtagtcagcttcttcctcaatccctcaaatgcctctttgcaaggctggtcaaatgtaaagtctacgtccttttggagaagcttggacaatggcaatgcaatcttactgaaatcctgaatgaatctcctataaaaaccagcatgtccaaggaaggaacgtacttcccgcacagaagcggagtaaggcaaagaggtaatcacatcaattttggccttatcaacctcaatacctctactagagaccaaatgtcctaggattataccatcatgcaccacgaaatgacatttctcaaagttaagaacaaggttagtactaatacatcggtcaagcactctagagagactatccaaacatgcatcaaaagaggaaccatacacaatgaaatcatccataaacacctccatgcaactctctaataaatcagaaaagatgcttaccatgcacctttggaaggtaccaggtgcgttgcataggccaaaaggcatccgggtgtaagcaaatgtgccaaatggacaagtgaatgtgatcttatgttgatcctctggtgcaatgtgcatttgcatgtaaccagaaaaaccatcaagaaagcaataatgtgatttacttgccaacctctctaaaacttgatcaatgaaagggagagggaaatggtccttgcgagtggcctggttgagtctcgtgtaatcaaggcaaactcgccaactgttggccactctagttggaatcaactcattatcttgattcttcacaactgtgagacccgacttcttaggaaccacttggacaggtgaaacccaagtgctattagagatgggatagatgttccctgcagctagcagcttcgtcacttccttcttcaccacatcaaaaatagtgggattcagcctcctctggggttgcctcattggtctagaatcatcctctaagagtatctgatgcatgcagatggaaggattaattccaggaagatcagcaagtgtccatccaatggcctttttgtggcctctcaagacatgcatcaacttctcttcatgctccagtggtagactactagatatgataactggaagcttctgagcatcatctaaatatgcatacttgaggtgctcaggtagtgacttcagctccaaggaagggggctgaatagtggaaggtaagggaagactagaaactgaggaaagtgggatagtagaatcagaacttgtatctgtacctggaacacaatcagagtgaagtgcggaggaaatttccacacaaatgctacacccagcagcagaatcatcacaagtacaattacaagaaccaagatcaaagtcagaaaagtcagaagaaagatcagaaaaatcagaaagtaaatcaaaaatatctacattatctactgcagcatcaatgatatcaacgagaaaaacaaaatgctcctctgcaggatgtctcatagcctcgtgatgtgttgctaacacatcttatttttaggctagttttagcttaatgattcaattaaatcattaggaattagattagaataggttagtttgttattattattgaattgtatctccttttattaccaagttatgatttcaggatcaaaaggaggagaacaaggcaaaagaaagaagaaaaccaagcagaaggtctcgtgtggatcgcgccagaacccgcgcgagtcgcgccacatgccaaattagaagtttcagtttcgaacaagtcatgcgaatcgtgccatggttcatgctagtagcgccatatgctcgaagccaaccattcagttcgaagactccacgcgattagcgtggaagtccacgctactggcgccattaagccgcaaggttcacgcgattagcgtgaaaactagcgcgagtcgcgccacaaggtctgaaggcagccattcattcgcgccatccgcatgattagcgcggactcttgcgctatcagcgccatgaagatcttgttgccttaattaaaattatttgattcgaaaattggcacaggaagaggcttggttacccaaattaaaccaatctataaaagaaaggcctctgggactgaaaggaggatactacacagcattcattacattctattactcccaaaacctttggaattcaagaatcaagctagggtttattgcagaatcatgtttcaattgacagctttggtgttcttgataactatgtcaggctaaattctgtattgtggttaggccaagaaccaatgtgaactcctctgtaatttaactggtatcgaatgagattgttatgattgttttattttactctgttcttaattgttatagtctttcttagaattggccattctatttaagtgcagagggttaggattcgcaatagggatgttggggttctaatttctgacatgagtaagataacaattgttcgttgcctagggatagggatgcatgattgcagaactttataatatattcttttaaatgcttagcttgatagaaatcactaaggaattagggttttgattcaagttaaagggttaattggctaagggattaggggttaactaaattagaaaagatttattctctgagtaatcagaagcaatcaactttgataaccagttaagtgaaggaggcaggaatcaaaggggattgcgtcctaatcacaattatttcatccattggttacaactcaactcaacttacaattttaattcttttaatttctcttatttattcaatcactcaaattcacaacataacaaacaattctttcaaaacaattctctttacttccaattacttagactgcaaattactgtgaatttagtaacaatccctgtggagacgatactctacttacccactttattacttgaaacgatcgatatacttgccgttttcgcaacacctcgaaaatgttgaactgaacaatgtcatcaccaaactccatagaaacagttccggcatgcacatcaattttggtccttgctgtcatcaagaatggtctccctaggatcaatgtgggaccatggctggaagactcattctccatatccaaaatgtaaaaatctgctgggaagatcagattatttactcgcaccagcacatctttaataagtgcaagcggaagcgcagcactcctgttggctaagtggatgacaacaccagtgggtttcatctcaccaaggtgtagtgctctgtaaacagatgtgggcatgacattaatggaggctccaagatcacacaaggcatctgcaaaagtaatatctccaatagtgcatgggacactgaaagtgccaggatccttgcacttctgtggcaaggtggacagtgggatggcatcaacagttttaccctggatcagtgcggaaacatttctgcccatcttcacttgctcatttcccttaagcttcctcttgtgggtgcataagtccttcaagaactttgcatattttggaatctgtttgatggaatccaagaggggaatgttgacttccaccctcctgaaagtctcaaacagatcagaatcaagcttcactactttctttgcaggaatggctctagaacgaaaaggtaagggaatctgttttggtgcagaatctgttttggcaccattgtcagcttctttactagcaccaggatcaattttagcaccagcatctggaagtttcgtgccactcctcaaggtaatggcactcacattctttggattaacaactggttgtgctggaagattaccagaaccctgctactgcatctagttgacagttgtagctaactgtccagtctgagtctgcaagtcctggatggtggcattgacattttgttgaaactggagattgctggttgccatttgcttcattaaatcctccaaggaaggtccagaactagcctgcataggttgtgtaggtgcaggtgcaggtataggtgcaggttgctggaactgtgactgttgtctaaaaggaggaggctggtatttagtagtggtaggctggaagggttgctgtggaggtctaaagggctgctgttgttgtggaccagggccatacctcaaattttgatgatctctccaaccaggattataagtgttggagtaaggattatactgctgttgaggtctgaatgactggccaggttgcatggcagaaacttcagcatgttgttctgtctcttggagagtggggcatgcatccgtgggatgatcaggggcacaacagataccacagagccttggttgattggctgccatcacattctgttgttgcctaatagcaagctacctcacaagggatgtcaactcagtcaatttgttctccaatctttggttatcagcaaccatagagacagaagcttcatttgcagccatcaccttagttgttgtaactctagcaccaaattgttgatagttggctgccatgttagaaatcaactgccttgcagcaagaggggtcttgtccatcagagcgcctccactagctgcatctatcatactcctatccatcaacatcaatccttcataaaagtactgaattagtaattgctcactgatttgatggtgaggacaggtagcacacagcttcttgaatgtttcccaatactcatacaaagactctctagggaactgccttatgccacaaatttccttttggatggatgctgttctagaggcagggaagaatttctccaaaaatcttctcttcatgtcagtccaagtggtgataggatctagttgaaggtacaaccaatccttagcaacaccatccaaagagaaagggaatgccttcatcttaacataatcctcatgaacatcatgtggtcgcatggtggaacacaccacatgaaactccttaaggtgtttatgtggatcttcaccagcaagtccatgaaacttagggagcaaatggatcaggctagatttcagctcataactgacctcagtctcagggtattgaatacaccaaggttggtaaacaacatcaggtgtagctaactccttaagagttaggttgttatcagccatgatatcaagatgtgtagaagtagaaggagtagaaacagattcaaaatcaaagtcagaagatactacactactgtctaaaactacactatcaaagtcatataagtcatctaacctagggttatgtctgtttaatatgtgaaatgtcctatctatctcaggatcaaatgaatgtaattcacttgatgtggacctagtcatacacagttcagctcataaggaacaataaccacagacaacacagaaatatcaagcagctatgctactaggacactaccaactatatatgctgaaatgaaatagaaattggaaaactgccctaaaaaattttgcaaaaatctaaaaaaataacattgaatgtctaaaaatcatgattgatttttgtgatttttaaaaatcatgaaattagaaaattgcctaaaaaatggtctaaacaatggaatttggtgatttggacctctggtgaatgtgttactccataataggtttaacttgatgtatgaattttctacaccttctggtaaaatttcagccaattttgagatagtttgctgtgaaattaccagaatgtccctacgccaattgtaaaaactagtccaaaactcctacttagagtttgaatttgccaatttgaacccacacccaatgcctaaaggggttgcttttgtttaaatgggggataaaccttgaaaaacaaatcgcaactcaaactgcacaagctggaaaaacttttgggacatcaaaatgacattacaaaaacaactatactacactactttctccctactactactctgtgtttttgctctgttatttcactgttttctttgttttttttgacagcacgcataaactacatcattgatacttcataatgcacaacagcaataatgcagatgtgtgacaaagtgcaattatgcaacagaatgtcaatatgcagtgaatgtatgcaaatgatttttttttaatcctaaacgcattcataatcatgaaaacaaaatagcaattgaagaagaagatgaacattcacataggattcgaaatactaaaccagaactcaaattctccttgtgcttgggttggatccttgaattgattgaggatttagccttccatgatcatcatcagtgaaagccccatggaattattacatgagaatggaagaacagaaaaacgaaaatgaagaacaatgaagaacaagcaagaacagttgagagaaaatgaagaacaagcaagaacagttgagagaaaatgaagaacaagggtttgattctaaaaactaaagaaaagaaatataaaacttgtttattgaaatgtaaagagtgctgctcaagtttcactaaagtcactaatatatggagtgactgagttctgaaaataaaatgggccacaaacaaatccaacaatctaattatttgctatttacaaccatgaaagtcaaattcgcagcccaaaattacaagtgcagaggtgctaacttccaagcttaaaatgaccctctaaatgacagaattggcctcggactatttctagcaaacttgtagatctttttgttatctttccagggactcctagaaagctccattcggagatcggtagcaccctataggtcttacacaagtcagatacgtcaagtgagcaaaaatccaaaaatacgcaacaattagcaattaagcccacttacttgcctaggccaaaaactgaattagaataggaaaataaaggtctaagagaggtcaaataaactaagaaggatagaaaaatactcaactaaaagcactctatcagtacccaattaaggttgggtccataggggttagctatttttctctttttctttgaaacctagatgcagtctccattagacacatagaaccttctagcataacacttatgagatgtgtggccttccttcatgcagtaatgacatataacaaattttgatcttcctttaaaatgagtcaatttggtatgttgtgtctttgaaaatcctttttgtttcatctgttttggaggtacaaacttggtgtttctgaaaggttttgtttgatgtttgtaaccatctagatgtatctccaacatacttttgattacttagcatttgatctaaaattcattttcctctataaagccttttcaaacgatcaaccaagtaagaattttctgaaaacactaacatatatttttcagattcactccttttgaaatcattaaacttttttttgtaaagctttgcatttatctacatttgatgaagaagaggcgcacacacacacccactagctttgtagcttgaaacaagtttttcattctcttctttcaagttacaaagttcaatttgcattgaagcaagttcagtggtatgccatttaaggttaccttttagcttattgttggagattgcaagtttttgagcctcctcatgcatatcattaaaagcatcaataaagttgatcaatttcaggatttacttctgattcaacacttgagaattccttatcttcatcaatttttgatgttagacatacatttgcttcttcattctcactcgaagattcagaagttgttgatgcattttcttcccatggaatgtaggttttctttggttttccttctttctttgctttcttctcacctaactgcttctttaaaaatatagaacattcagatttaatatggccttgcttaccacattcaaagcagttgtagttggtgttgttgttgttgtcactctttttgttgaactttgtgaacttcctgttcttgttcttcttcatgattttgttgaatcttttgactattaggttcagattctcatccccttcatcttcacttgagtcttcttctttttccacatttaaggatgtagctttcaaggcaatactcttttgtttcttgtctgcatcttctgcatgtgttaattgagacatttctaattcatactcaagtagcttaccaaatagtgcagccatgaacatctttgatagatctttagactccttgattgttgtaacctttggttgccatggtcttgttaggcatttcaagatcttgatgtttaattcttcagcatcaaatgtctttctaagaccaagaagatgatttacagtgtgagcgaatcttgtttggagttgagatatgttttcagttgtcttcatcttgaacatctcatactcatgaatcaaggtgtgcttctttgatcttctaacttcatctgtaccttcatgagtaatttctaacatttcccacatctccttagcactcttgcacctaacagtcctaaaaaattcatcagatgataatgtagaggttatcatattcttttctttaaaatcgtattgaactactctcttttctgcttttgtcatctcatcctcatgaatcacggtgtgcttccttgatcttctaacttcatctgtaccttcatgagtaatttctaacatttctcacatctccttagcactcttgcacctaacagtcctaaaaaattcctcagatgataatgcagaggttatcatattctttgctttaaaatcatattgaactactctcttttctgcttctgtcatctcatcctattctttgggaatcattttatcattaacaattttgattggaatgaaatgaccattttctattgcattctatgcaccagagtcatttgattggatgaatatctgcattctgtttttctaaaaacaaaaatgctctccttcaaacatcggaggacgattgaaggagacaccctctttgaaggtaatttgtgtggtattcattttctttgaaaaaaataatgatcttgaataacactcaagaatctgttcttgataccaattgaaaattgtatgaacacacacaataaccaagagggggtgaattggttaaaacttggttttttcaaactctttaaagaatcagagtaataaagatcgtatcacaattaaaccaagaatgctttaaccaatcaaatcactcagctcaagaaaacaataacaaaactttcacttgttgaataagaaagatagcaccaaagaatcatatattaagacaacaagaaaagattaaaggaagtagtcaacataatggtttatacgggttcacttctcaccttgagaagttacatccagttcgtccaaccacaatggttagagttccactaataacaaaaatatttttacaagctttttacacaatcacttttaatcagacctagattaagaacgagacttctaacaccttagaatctctatgatccaagacattgatatcgcccacctctactcttatcccctaggaacacctatcctagtaaagctctaagaaatgaattataatagttacaaacaagttgaaattctaaaacaaattacaaataaagtttgaatggagagaggcaacctaatgatccaatgttaatgaatgcaaatgattacttatcttgaaccaaggttgaatgaaaacaaattcagtgcattctctctaagaacttctttaaaatcttgcccaaaaataaatctttcaaagtaacatgaagatttagaatttgtagggcaaaagctcattggcttaaagtatctcttctcacttcaaaaagcttttgaaaatctatgaaattttcgttgtgtaaatgattacttatctccgttccttgcataataatcccgacaactacttgaaatgaattattaatagttcaattgtaatttgtaagacatttactttatcattagtgtaacaacctgtctcatcgctatgatgtcactactctaaaacacgacatttcaattttaagtgaaaactccattaatttgattatgaaaacaagggtaatttttttgtgatgtagattcaccaaacaatgcacaaatccgtaaataaataaaaatacatacatacatacatacatacatacatacatacatacatacatacatacatacatacacgcatactcacacacacacatatatatattaaaccactatacatcattcacatgttagaacataattcagtttttacatgtatctaaacctgggatttacatacctaatcaaaagaatcaaggaaccaactaatgaagagttgataacaaaatacaactctctctccaaaatatatttcaacattatcacgtcagcttgacggctccaacaaaagaattccctccaaagacacctattgctgctcatctgctcccacgaacaaaggttcacaatcatcacaggtaccaaccacacaatacaaaattgcaagggtgaatttattgtagagatcaacaaatatcagatgatcataattagaaagaagacgataacaaaccatcacaatcattctcaatatattcatcagttcaacaaacacttaacaaactagtcattaactttacaacaattcagattaattatgcttagaatgatgcatgcacctaactcaactctcaaatgcaatgtggtaccattcgttaggaaatagcctaagcatgttcacatgacattctcacttaggaaaactagacagcaactgtcgaggtcaccctgtgatgcacaggaaattgccccacgttgatcaacacgagtctcaaaggatttccaaactgagtgatatgccctcaagtaccaacatttgtcctctgtaaagaagtaaatagaagaacaaatgtaaaattttggacagagtctcctctgtaattaagactttttccaaaaattccaatcattacaacaacatcctttacaatttcattcatcaataacaaatatatcacatctcattggataaaaacacagttttttcttgaaaaccaatatgcacagggatagacatacattcccatagttgggttccctaaccccaactatggtatcaaaagatgcaaacaaacaataaactcccctcatctatctatgtctctttagcttcttgcaggatcgttttgagatctctcaggttcatgtcctttggtccaaacgtagagctctatataccaaatcgaagacaattcataatagattttgaagataaggttaatattaacatttagggtaaaataaacattcagttttaaaggggactaaaatggtgttttggagtctacatcaaagagacgtcattttgaaatttcgatcacgccaatgtcacagggggttcaatgaagggcacgaaaatgacatcaattttataaaaaggaaacttttacaacgtctcattttcaaaggtttttcaaaggaagtgtaaaaacatacaatagtggtattcaaatcacaagagatactaagaggcttaaactaactaggagaagacaaggaaatcatgcttacctcgaagaaaccacaaaaagagggttgagagttccattttctactgaatcctcgaggggggtttagaagatttcgctctgattaaagtgttcatctctttgcagtggtccaacggcaagcaacaacggctcgtggtgtcactggtggtcgttggtggtggaggaggaggtctagggctttaggtgagggtttggagagagagagagaggggtgaaaaatcgtgtttttcacgttgatgaatgtatttataatctgtagatctcgcttagcgaactcgtctcgcaaagcaaaatttaattttttatgtgttgagcgtgacatttcatgttgagcgaatttttttctgtgttgaattgcgcttagggcactcgttgtgctaagtgagatgtaaaaatatgttatttcacatatgtcaacggtgaaaacgtgaaaacatgagttgcaaacccacagtccttgtttaaaggcaatccaacgattaacaagtctgagattcatggttttactgaaacaggttttgggtaacacttgtaatctcacaattccaacacagatcgaataaactccacataacttaacatcgacaaaaagaagttgtacaaggataactcacacaacacttcaactaatccaaattaatcaaataatgaattaacacaagaaatacatcaaacatctattttcagttatcaaaatttcagggtgttacaattagtatttgacatcaatattttaattgtacaatatgcatgcatgtttctcttaaccagtgctttgaagggattcaaagatagtcaaggaagtaaatccaaggctactgctaaatggatttcagttaaagtaagtcatttaaaccatgtttgatgtcttacaaattacattttattactgtatacactaattttgggttaactttgaatatctgaatattttagtaaatttaatgtaacaagaaaagaggaagtactgggtgaggttattacttgatccattggatgccaacgacaaccctaggaggtttcaaggataattgaaaaatgataattgtttacttcaaaactaatttcatttgttatagttgttattatttacactgattaacttatgttttattatatcatagaatattttactgagacaaaagcattggagctagagagaataaagacaatttccattcagtggacaagatgttttctaagacttaaaaatgaaacattaggtgtttaaggaattttacaactagagttatgtttaattaacttaggttatagatgattttatgtattgacattattgttttcattattttaactatttcttttaattgatagtaattatttaacaataatataaaaatttgtattgcctgaaaactgtctggacttgttctgctttttaatttgcaagtttggataatattaaaaaaaatagatagaatattaaaacaattacaaaaaaacaacaccatttttttggaaaaatcgaagttgtagtgtaaaaaatattgatttttaaaaataccgatattgtggtggaaaaagcaacatcgattttgctaaaaaaaaatgttggtttttgcatattatactttttttttatttcttatcatatgagacaatgttgtattgtgtattttaacatcaattttcattatcgatgttaaaatagatacttttaacgttggtagtttcaacatcggttcataatcgatgttgaaagtccttaatagtcgatgttaaaagcatattttctagtagtgataggaccaacttgttacaatttttgcatattcaagtacttaatttgaattttcatcttttatgaactaatttaaaataaatacttttaacgttggtagttttaacatcggttcataatcaatgttgaaagtccttaataatggatgttaagagcctattttctagtagtgacatgaccaatttgttatactttttggatattcagggactaaatttgaatttcatctttcatgaagcaatttgtcatcgtctcactttgaaggacaaaaataaatatttactcttgactttatgatgttttaatgctttaatttactttatattcagcttatttgatttttaattagtgcatcactttcttcaataatttttagtaaataactagattttaaactcatttaatacatgagttcttttaaattatatattttaaaaattatatatataagtcaaattaatttttaaaatatttagtaacataaaaaacataattatattaaaatcaataaacatgattaaatattatttttagttacgaagttttgctcctattttataaaatttgtaattttagtccctctatttttaaattgagatattttgtttctcacttttgaaaaattcaccattttattccctatgactaatttcaaccattgatatgtatacttcatttaagattgactaacacctgtgtatgtatattagtcatgtgacatatgttttatttaattatttattttgttgataagctaaatatataagggaataaaaatgacattttagcctcaaattagtttataatcattttttatatatccaagtaataatagtgatttaatacctatataaaatgtataacttaaaaaatatatatactacatgtaaatttataattgtttaaatttcaggatttatttgttatcttgaatactaagtacttctacatgtacatgtattgtttgtgtttataattaataattctaaatttttaattaaaaattaaaattaatttaaaataataattttaataaatttaagatattaattttaattatgtgataatattgaagtttttaaaaatcataaccttgaaggtggacccgaaactgccactgccaagaacctcagctgaggcccaaagtagtagttcatgcaaattgcttagggatggcaaaatgggcctggtccggcaggccagcccgtttaacccacgaaaaaatgtgggctgggttgagactttgagcccacattcattaaacggggtgggccaacccggcccacaaaaatgtgggccaaatgtgagctaggggtgggctagcccaccgggccaacagcccacctataaaaaataataaaatatttaataggtaattaaatgagtgacttagagagagagtgactaaaaagaagttaatgattttgaatccttaaccctaatacatttttattttgaacctaataatgagttatactacatgtatgttttgattatctgcatcattgtgaaacaaatatctaagaatttgttaagagttaggagctaattgaaaaccattgttagacatgtatttcgtgcttgcttttacttctattaggcatgtattatatattaaaaatcattgttataagattaagttagcacattattaatttttagtataaataattacatttgaatttttttaataattattttacctttttaatttttttttaagtggactggcccgttgacccactaacccactttaaagtgggacgggctggtatttttagcccactttgcaaaagcaggccagcccagctcggcccacttttttagtgggttgggccagcccggcccatttttgggtgggctggcccactttgccatctctaaaattgctaaacatcccactacaagaaatccgcaacttagtggtggctgtgtactgtcggtttttaaaattcgccattaagtttttttaaataataaaaactgcgtcgcttcttttcgtcgattttgaacagacaagaaggcggtgaaggatttagttatatttcgtgcgtggctcactttttgttttcctgcaatttagagacgcgcgcgagctaaaaacactgcttcacttttccttcactcttctcatgtttcagaaacgatgtctgagttctctatgatttactccaattttcttcgtgagtttgggaatcaactccgtaactgtgagttctctttgtgctacaagcatcgtgagttctctctgctcctaatcttcgtgagttctctttcaattgaaatcctagattgtgctctgtctctatattgtgaatccctaaggtgtagtctgggaatcaactctaaaactatgagttcttcttgcattggatctccactcaccactgaatgccaagcatgagtttcttcacgtgcttcaggactgagacaatgattatgacttttaacattttttttcatactaataccaatgttattaaagattttagcaacaataccaaggcaacgttctaaaaatgtttctaatatatatcttttgtaacattcaacaaatgttactaatttgtttcttttaaaatataataaaatatcattttttgtaatattttaaaatttataattttaaatacatgatttatacattttttattagatattaagtgatgattgttatacatacttgatttttcacttaaattgaataacaattttatctcatttcttcttttcaatgctccattacaactaaaagataggaatttggattcttatggatttttagcttaaggaagttaatgttagtaaattttatagttttagttttgttttgtagagttttggtataacaataattgactggaagatgttgaagaactaaaccagctggcttagcgcgtctatgcacgcttaacgcaagaagtccaacttagagggacatgtgtcaagcatatgatggtgattctagtcaattgtattgtgcatgtacactcaggcttaacgtgctcttgcttaagccagttgtattgtgcatggtgctcagtatgcacatgcaagcttagcgtgcaatgtctttttgaaaaaacacgacagttcaacatttctgaggtggttaaaaggggcactgttccattcaacaaagggaatcgcctagggcatttttctggagacaaaagccactttgggagcccttcttgttccatgttctccattttttttgtttcatcttcttgttttgggtctcttatggccatgagaggcgaacttacccattgttgggggttggatacaaaaaatctatgatgtaatgatctctactatacatttaatgttatttcaatattattgcttcctttctatgtttactgttttgtttatgatttgatcactcatatacatgtatgttatattgttttaaccattgagaaatgtttttacactaaaacttgatggaacttctaagtaacctatatctagggatgaaatggtgttggttagccttatttgtgcatctttactcttaaataagttacttgatttatctttttaagggataatgagtgaaatcaagtgacttaggctctttcacacgagggatcatgattagagtatatatgttggtaaagataatagttataataattttaaatgataaaatctttaacattacatcaagagtacatttggtaggctaaacactcaatgcttctacaaaatctacaccaaattgtcatttttacacccaaagtgtttgtttttctttctctttgaaccttactttgtttttatgtttcctattacctttgaactttgcattttatacagttttaccttaaaatacatcacattttcttcattcttttgtttaaaatttgatatatacaaactttgagcttaaacaaagtccatgtggactcaacatatggtcttaccttttattattacttgtacgaattggtatgcttgctaaggagttaacattaggtaatttttttaacaccataaaataaattgtataatgaaaaaaaatgttatgatatttttctaaaacttgtcaaataaaggatctactaattagaaaataaatgcatgcatgcaactaaaacacagagacacatgtgaaaatcaaagtcaacggggtctagcactttgcggtcgaagttatattgatttcaaggaaagacttttatataaaaattatgtatgagaattacaaaaactataatttaatatagtatgaaaaaaaacaatggcccctataggccactaaagcattatacaataattacataatgtataatattcctattactataattacattatttctatcaaataagaaatcaatccaagacttgcattagatccaaccgacaagtgtctttaacaatggcatttgtcagtgacagaggtatccacacaattaggggaacaacaaaccaagtgaagatgaaactaaaaggctccgacagttgcattcaacaattcataatatctgttataattgcatgcattaatgtaacaaattcactctaaaaaagatcagtttttgagtacttttcaccaaatcattcacccaaactaattcacttaaaaaggaaaactaattgcattttatcaatcaacttagaatttgatttgtacatccaagaatataacatgcctgaactcaaatttagaatttcaaatgaaacttgcaaccaaactcaactttagaaacccaaaaagcataactagcatcaacaatttgtgctctatgactttctgatcggtaatcatagcacctcaagagttgaaggctcgtagctgagatgagattcatggacatgtaggtctcccatggatgtccctcctcagaaccttccagaaaaaatacacaatgtaagtgaagaaattcaatatctacatccacatatgtacctgagcgaggttttggtcttttggaggcatcaaagattactaaagaatgaagagcccgaggtcataattcactgtgctggggcggattttgagtaaaaacacacatttaatcatgacagccaatatgttctaaattttctatgaagcagccactttcagcaagaagttttatcacttcactaggaaaattactgttgaaaagataagtttaagcaacttaatattaagtacatttacttccattctccaaaaaggaatcatctttatcactctttctcaagctttgcacaaatagtccaaatatagtccaaaaaggaatcaacaagtcctaggacttcttaggttcctttgacagcttgcttcatgactaatctagcaaagcaatatgtcacattaattcttagatcttgttttaattaatatcattaactaaaacacaagtctggtagaggaatttgatcaaacagtttttggccataagaaagagaagcataagatatataaacagttcgtgccaagaccctcaacattgtctgccactaattaaagaaattctagtgagatgagatgaatcaaagagaaaagctaaaaataaaactaacagtaagcacataatggcaccatagaaaatgttttaaaacccaagaggtaagataacaaagttaagaatgaatttcacaatctctttactatgtgacaaagttctaaagcaagcaaatcctaagaacttactcaaacgaagtgtctgaagcatgtgagaaccatagcaattacacattacatcattcgaatttgtttcaatcacctgctaaatgacataggcatattatctgtatgttttagattataaacacgctgattaaaactcaaaacagagcataagcatattctcctatgtgaaacaaagtattattggctttatttgtaaattgctcagcaatggaagccagaaaaaagtaataaaaacctaatcacaatcattaacagatccaagtgaacagaattggttaccgtgactaactcaattgctttggctgtggcaacgtttaatgccagtggcaatccaacactggaatgcaaggcgtcgccatcaatatcttagaaaaacgagaattgaagttggtgaaatgaaatttgaatttttgttatgctgtgcaaaactccaaatctttgaactctgtgatgaaatttgagttagggatttgcaacgataaaatcgaactctgagatcaaggaaaaacagtaaatgcaattgagacatcgaaaataaaaactgaaaaacaaatatctcatagagaaatagcagtattgagtaaaaaacaaaacaagacctgaacattgtgcagttcaatgtggtcctagactctttcaatcatcttcgtcatggtgtttgtggtggttcctccgcatgcaatagcttccttggtcacactcttctcctttgccgccatgaatgctttatcgtcgcttgcactgaaaaccctagttgttgccatgatcatcacatcgtgacaaccccaacttatctaacagaagactaaatcgagagaaaaaagtttcagataatcgtgagtgagagaagactcaaaagtgtatgggggttgttggtcactttttcggtagtgcaagtagtcacggcacttctgtttttagacatttggtaatgtttatttaacaaatgtttggaaaaatttattaagaaattgcaacatttattttaataaatgttaggaaaaactttacttaataggcaatagcaacctttttaaaaatgttacagcttaaatgttgtaaaatgtgttatatgtagtagatatacattgaacatattaaatctaacatcctcatttgattgattttgactggtttcatttatgtgtattttagtgattaatgcaattactgacttcaattgtgtactcattctttttacctctgtgtgtttttataaatgagacactcgtgtattctccctgagtccctattactttcttgatttatcaaatgattttgatgggaattcttttagttttgagaataaattctagttatttttatttttattttgtttccttggcttgagcatgatggatggatttgatatcctttcttgagcatctggtttaggtatacgggcatggggataggatggatggacgaacccacattgaggtcaaactcatttcaagccttgtgtcatgataagccattatccacgtacgcctatcctaacaaagtcactaatttctttccatgatcagtattgacatttcttcgaatggtcgggtgatggaccatgtcaagggatttgactgtactaatcgctcgattggtgaaaatctccatggagccgtgtttacatatagtgcatgactaggacatgttggttcataatggaatgcattcttttgtatgtttttatttgtttacctttggtgaatacaccttgtgctagtacacatgtattcttcacctttagagatacattaatgtgtttggtatgtggattgtagtgccacaagatacattaattatattttgttggttataattatccatgtgcgtgattcaatatatgttttcttactttgaatatttaagttgcaaattttgttgttggtgactatttttgagaaagattataaacacgaaaaatttacatgtgattttagataaataaattagatgattttttttccagaatatagtagttaagttgtcatgtagcgaaagttgagtatatttttcaagcattgtaggacctacaaaattaatttaagcactcactttaacaactttaatattgaagtgaatttttgtgtaaagtacttacatctatctagaattatgagaccaacaaaattaagataaaccattaatttaaacagttagacattataaatgcttttattatgtacatataattataataaaggaagacctaatcttatgttaataatactaaagcgagttaagtttgaggaaattttcctgcctaaacttgcacccaaattaagaaatggttttacatctccaaagttcataaatgagtctccacatttcctgtgtagcttggagtctcaatgtttcctatgcatgttgggctatactccaacaatattaatagcaccgtcaaggaaaaccttgttagatatagggggaactggaaaaggatcaacacaaggatgaaggcatgtgtcttaaataaattttagctttttacatgtcattcaattgaagatatttgtaatttgttaagttgtttaagaacctaatcttatgatcccttgcattgcataaacatgatcattagcatgcatacatgatttgtgaaaagcataaagggtttcatgtttgcataaagaagcaaatttctcatggttaagttttggaaaatcacattgtgcactgacttaaccgattaccagcattggtaatctattacttaagccacaaagaactaattaatcaattacaaggaaatggtaatcgattacatagtacaaaacacagagtatgtctccctgggttaatcgattatcatctaattgtaatcgattacattagcacgttttgaaacagagactgtttgagataattgatcacaagtcgttttaatcgattacattgctcatatatcttttccagaaagaactaagaacactttaatcgattaaataggatattaattgattacttaagtgaaaataatcgattacatggacatttaattgattacattcagttgaataagttttctataaaaaaactgttgggtcttttgtttgtagacagaactttatacttcgaattttccatcactttcaaaaaccctctgattctgagaaaagatataccgagatacatagctcttgttccaaaaccaagaaacacttgcatcattgatcaaattgttttggacaagatttgacaagagttttaatggagagctgatttcaagattgcattcttttcaacctgatttttgtttggtaaattcattcactcacattctgggatcataaggttgtatctttcttaaactgttgtagtaattcatttgttacttttgttacttgtaagttcctatttcaaagaggttctttaaagtttttctagagtagggttctctagagggaagaatagagaatggttctcaagttcttgatcattaaaagtatgaatgaggtttagatttcagttctttatctagggttgataaagggtgatcaattgtaagcttgtaaagaacaaattttgatatagtggaactctagccaaggtttggttagaagaaactggatgtagcttttcttttgaggagtgaactagtatagatttagtgttctcttaattctcaccttgctgtcttaatttgcttatcttgtggttaatcttgttcaagatcaacagatagattttatgctattgcttgaagtgaagggtgaaccttgattgattgaaagtttcagttttaaaaagggtatacttgtgatacgatctttaatttgctgctagtttcaaagaaagttttaaattccctgttttaaccatggaaggaaattgtgttcttcaactctaacaatattaataacaccatgaagacaaccaatggaaaggaattgtcttcttcaataccaaagatatatatccgcattaagtgaagatgccatagagcaacacaatcaaggagaagggaagaagtcatccattaaacaacgttgcgattctggcttttcgcgtccctatacataatggtgtcattgcatatcgatgagcatcacaggacatctaatttttccttccatttctatagctcatacactacacacatgcaatagtttgagttctgaagaaaatgacaacaccgatcttcccccaaccaacatcgaccaactttaccaacaacttcgacaacatgagcaacttcaccaacaacaatcctcatatcttggtcggagaatggaatctcagtatgattgcatttatagagataactttttgattttgattttttttatttcttttattatgtctctatgattttttgctctcactcattgaagcatgttaagaactgaatttaggtttttcacttttgtttctttgagaatctagaaagggaatctgagcattcctaaactcattctttttatcacattatatatccaatacgttagcggtgttaatggcataggtgtttttctcaattcttgtttactatcgaaactcttcttatcttttcaccacctatgttttgagtctaaaaatctttgatgacacatatagcatgtcttttgacttttcgttaagtacctagcacatgtatggtgctgacatacatgacatgccaattttccacttttactccatcttgataacataatataagtaggcaagtcactaatagtccaaagtaaggcaacatgtgcctgaaaaaacatattattggaagcattataagtttcaattcctttctcccacaactcttttaattatctcatcaataataggttctaaataaacatcaatactacttttaggggaagatatggaccatgtataagtaaagacaacatcaagtaaggttcctccatacaatcccatgaagctaaattgtatgtcattagaattacaggccaaatactatgtcctttgcccatcatcttaaatgcattaaaatcgtcacttgctaaaaaaccaagcctcacattttgaggatctgattcaaagttcggatgcagagaatcaaaggttctccaatcaagtgaatctatgagatgtcttagctttctatctatggtaggaacttcatcatgccatttcattaatttagtggttttttatgacataaatagcctcttgatcctttgtgttaaaggaatgtacatcaaaactttggctagaatcggaggataagctaccttacaaggaaattttcttctagaagaattttgatccttcctttctctatatcaagaaaagtgacactttgggcatataactgtattctcatattgctttcaaaataagatgcaatcattaggacaaacatgaaacttttcataattgaaaccaaagtcctttataataaacttgcaatcttggaatgttgatggcaaataagagttcttaagaagcaaccctctaggaacatattaaatgatacattgcttcaaccatgaagattcttaatatgcaacaaatgaacaatgattgataatttggagaaatttttacaaccaagatacacttcctggcatgcatcatatactaactctgttagggccccttaatatttatatataaagggtgagattattgaggtaaagggactatcctttctaacatttattactcttatttactatagagaggaaacttacttgagcgttagagtgaatttgtagagctcgtcgtcgaggaggctgaggagttcacagaggggaagacgaatgaaacatcgccaaagtaggaaaactcgttgaagtatggtctaacccagatcaatacaacaccaaaatcaaaagagtatatccaaacataaaactcttatattatcctttctatcaagtgatggtcacaacaagtagaaaaaattttgtcgttaaagcaaggcaaaatggtcctatgttgtcataaaaataatgttgtgaacttgtgagaaattagaagtgcagcagtgcagagcaccagaggagaagcactatgattagtaaggaaaactcaagatcgttcctcactctaacaatggatgtggtcggcccgtgtaacgcctctcttagctcactcgtgcttgattgtttttatatggaaattcgtgtcctttctgtattataacgtttttagttataaatttttcacgaaaattctttttgcttcacttgcaaatgattcgtttgtaacgtacacggttcttcctcaccacggttgaattataataataataagatacagtccagatacagttatctaaaataatacacaacggtctactacaaattacatgccacaaaattacagactacaacaaacagttcatcaacaacttcttcaacaatcttcatctacagctcatgctttcctgttcctctgctcgcccaaatgaattggggtcatcacaggtatcaaccacagacacaactcgggtaagtttatgacaagcatagtttgaataatatctataagcacatatggataaaatcttaattataaaaagaccacacaacttatacagtatacagatcatcaaacagatacccaactatgtgatgcataagatgcatgctcatctttttatatgatgcatgactgagatctcaggttatcattaaatcatcatcattagtggccacagccagatagccccaatcactggtccaaaacttgcatgatcagtcagggtgtcacagtggtgcacaggaaagtcatccacactacatgtgatcatcatgggtggcgtgagttcctcactgccgaagcaccccccagctcagactcctcattgtctgaacgctcatactcagttcttctaactatctgacacatctccacggattaacccccgcaaggcatcaactccacggattaacccccgccaggcatatgcgtatgacaatgcatgcatgagaagaagaataattaaagatgtgataaaagtaggtttaaaagcatacttatggtgtatgcttttaaaatgcatgcatgattttaaagaattcaacttatggtgtatgcttttaaaatcacaattaaagcttctttcaatcatcacataaagcttttcaccacagcccaagcatacagccatagttcaattctttaaattcttctcagataagtcataaggtcatacaaccatagtctactccatacagttcttagaacaaatcataatttatcaaaacttaactatttcatttacttaaagcagttttatctcttgaagtcaattcatcaaccacatggtgggcttttacagaaaacactcagcaacacatgaaataacacacaacttttgttttaaacattcagtcatgcaaacacacttcaaatctaacagcaaagcatcaaaccaacaataaagattcaaacaaacaccttttaaacatgtttcattcattgtgacaaattatcaaacacatggtgtgcaaccttgaatccatagaatacaaagaaaactacttaaactttaattcttatgaagttcaacatatttctaagaataaatcaacatgttctccaccaatttctagcatcaaaacaacaggtatacaattaaggaaacatagaaaatttcggccacatcaaagcttaggaacatattctattaaacaattctaaaccacttttcaaatagtacaaaataaatagttgtaaatcactttaaatttcattggttaggttagtttttagtttatttaatcaataattattttaagactaagatcaatactaattaatcacctactcttcatgtagcaattcttgagttctttgaggcatttcatcaaacatcttgtatacaaggcttaatttctataaaatcaacatacttctaagaataaaacatgtttccaaccaagtttatcatcaaactagatatagatacttaagaaaacatagaaagattccagcccatcatcatataagaatcttattcaaactttgaatatcataaactccccataccttatttgccttaagtttggacagctttcctcctaaaagcttgataaaacttcttcctaaaagctcctagatttcccgtgaggcttcagaatgctagggtttttgttctttgaaagtggaagggtgatggaggaggttagggaagctttggggctgttgggaggcttgattcctccattttcgtgccttgggagctttatatacatgctcagcaccgccttcactcacccaggcgaccaaaaattgcctgttccactcgcctgggcgagcagcccattttctagaattttctgtcttagtgaaaaattaatttataacgttccaaaaattatttggacaatcccaacggtcaaaagttagatatatgagttaggaagcttgttgtaaaatttgaggaagatccaacggttaaccaatatataatgatgattttactaaaataggttttcgggttaaattcagaatcactccattgcacgcaattcaaacaatcttcccataacttgacatcttcacctactctatacacctagggatgggaacaaaagtattcttctttttataccatttgatgcttaagaaagccttattccacttatggctttctgtcacaaactatttcaatagtctgttatctaagagtattctttattttcatcataaaaatatctattcaaaatatctaagggtgttcttgtcctttataaaatatttaagggcatttatgtaaattccccttctaaaatatccatccaaaatatccaagggcagttttgtaattttcaaaatatctaggggcgttttcgtcattttgacctcaagggcatttttgtcatttctgatttacggaaagggtaatatggtcttttctaaagcatctaagagtctttctaggatttctttcctcaagaagtcttgctaaactttctagggcaatttggtcattttttgaaatgcccaagggtattttcgtcattttttccaaatccttccgtactgcctctacttatcattttaccctagtaattgactgtggttccaaaatttggagtgttacagcccgcgtatatcaaaatcataagaaatgagtgtcatttggtggtcatggtgggtgtgcacggaggaaaaagttggtggcaattgagggagaagaaaggcacgggaggagaaaagggaataaggcacgtcgtaaaggaaggactatgtgtcagagtgtgtttaggtaacaaagaggtttcaaatgcttgctcgtatctacaagtaagatgtttagtataaaaaattaatctggcctgttaattttcatccaaggactaagattatcttctctcactctcatataagacatcctcttctcatatgatatgtcatctctctttatatatatatatatgtatgtatgtatgtatgtatgtatgtatgtatgtatctcatatgagagtgagatgattaaatccgaactgtataaccatatatggaggataaagatttaatgtcaaaaagtcacatgactttttaagtaatcatatgacattaaatcttgaccatttatgtttgattatatgatctaaatttaatcatcccactcttatataagatatctttctctcatatgatatattcttatatatatatatatatatatatataaaagagaagagatccacttttttatataaataaaataaaaaatcattctcttctctctgtcattctctatcttctctttgtctctcacctaacaatggagtggaacttttctctttgctccctaatctcgcgtaacaatgtaacattcatcatccaaaaactcaataacatcctttattgttcgtcttctcgaaatatcaagagttctcgttcaacatcaataaatcttgttttaactcccattttttgtacatcagacaatgtttttttttacataattatttctgttacatataaatttaaaaaatagaataaaaaattatacctttctgtatacaacaataaatcacaaaagaaaaacccagaaaagtatggcttagtcaaatgcacatggttggtggtggcgttgctcacatcaatcaatggaactattttggtcccttcttcaactaaggtctgttcacaccagttgcctatgtgatcagagttctatcaattatagataattatacaccatacatgatcatgggtttcttcttgctccaacaattttttgctttctaaggtaaaggattgttgaagttcttagtctcaaagaaaacctgttgaatgggactactccaacttagatgaatcgtggtcaaggccgaacaactgacccattctctagacatggactttctgacgaagctgctttaggaacatagtcctgcgttcatcttttggatcgatcaaagagagaaagggagagaggtgattgtgaacatgttagaagagagactagagagatgggaggagagagaatgaatgggagagagaaatgatttttttaattaaggttgatgatagcaacactgcaattgatgatagcaatgctacaattcccaccaggctgataagtgccatattttagttattttcgggattataatgttagcacttatcatttgatttcaatagaaattttaatattttgataggtattttgaatcaagcaaccaagccaagatggaggggcaaaagagtcaaaattacaagattccaaaagtgaaattcgccctggctagcaatcagctcgtgtgggctaattaggttacctatccatgaagcaattaactcgcttgggtgagtctgagctcacctgggcaagttggtctagcacctccttcaccatttgctataaaaagccatgcaagggaagctttatggataccaaaacgtaccaaaggaagaaaaagacgcagaagaatgtgagagaagagagaaaaggagaggaaactctgccggaaaggattgtgattcatttccttcatcatgccttctgttgatcttgtgctctacacaatgatcggctagtttctctaaaggattggatgtaattttcatacccttatgtatctcttttgatatttgatatatgtatgaatcttttctactcattcttggtgattttattttgttcgtaatccttgattctacttgatcactagtttcatgaaaattgatgctaagtttgactggaaagtgctcttagaatttgaactgaatgattttactctctacttacgttgctaggaatagagtataacgttttgattgcaaatagcactagaatatgattataatgctggattatttacttcatatgcgagggatcgatatttggtaaatatccttaggattctcgaatgcaagggatcaattcggggtgatttaatgtgtgcatcggtaatgttagaaaatgattcatatgtgttaatattatttggatattgagggtatgaatgatgaaatccaatcctacgttctcttgaattaattaaattcattttactagttttcataattttttgtatttctgacacactaatccgttatttttgttattttcgtaaaaccatcaaattttgattatatttgttgtatataactattgaactgttaactttcatctgggaaaactgagtagctgaagtctatgtggagacgatcttttataaattctgtaacctgtgacgacattggtatgcttgccaatagtctaacacagcccaagaggacatcaaggaggcccacccacctcaacgatttcgtgtaactcaagctcatgataaggacaaggttgttgaatattcctttttgcattatcagtaattcggttataacaaactaggattctagtctcaccaattatgctattctctatttttagtgattttccagctgaccaatgattggcaacagtacccatcagttgtactccttataaataccatctaaaagaatgaaagaagcagagaattattacttaattatttccttgttagaattagcatagtagtatcttatccgctagtctgacctgccatgcccgaccataatacccgcaaaaccaccactaaccgcctcgaggaggctgtgaattgccttacgcagagccaaaacaccctggctcaaaaccatacttctcttgcacaatatgcagcaaaatcgattccattttggaacgactcgttgctctcacgatcactctctctttacccaaatctccccaaacacctattccacccactcctcggctgcacatgaaactggaggtgctgcattttgacggacaagaccctatggttggatatcaaaatttcactgttctttgattaccagggtcatgaggtgatatctttcttgaactcttaattgtgatttgttttgtctgtttttagttcttgtattttctaagatcaaagagattctttaaagctttttctagagtagtgttctctggaggataaaacagagtggtgtactctggttcttggtctttagaagtctatagggtttagatttcgtttctttttctaggtttgataaaggtgatcagttgtaaaagcttgtaaagaacataatttgatttagtgaaactctaacctagtgttggttggaagaaactggatgtagcttctcttttgagaggtgaaccaatataaattgttgtctcttgtttctaatctggctatctttcattgcttgtacttgggtgatcaaatcataatcaacaagaagtgattctgacattacatgcagtccaagctaaattttgattgaaagaaaatttctgattttgataaaagttgattgagtgatacgatccattttaattccggtgctagtttgtttttcaaagaaattttttaactatgttataaaccaattcaccccctctcttggttaattgtgtgtgtacatcattgtttcgactttcatcaagtttatttctaaaaacccacttggtgccaataggcttgtgagaagaaagtctaggaacaagttcccaaacttcatttctcttaaattgattaagttcatcatgcatggcaagcatccaatgttcatcaagtaaatcttggtcattgtttttaggttcaatttgagaaacaaaagccatattacaacatagatttctgagtgaagatctagtatatactccctaggttacttcaccaattatgatgtcaagagaaagatctctagttgttctcctgtccttaggcttttgagggggtgatgactgattgattttttcatttggttcaatcttttccttttcatttgatccattgagttgcatatactcttctataggacttggatcattgtcacaactcttttcctcttttgaggagttagtttcatcacaaataacatgaactgattcttccatgcataaaattcttttattgaagactctatatgtttttctttgtaatgaatatccaagaaagatggcttcatcaacctttgcatcaaacttggcaagtgattcatttccattatttaaaacaaaacatttgcaaccaaatgctcttaggtgaaagatgttgagttttctacctttatatagttcataaggagttttctttaaaataggccttatgagtaatctatttaaaatgtagcatacaatactcactacatcagcccaaaaaagttttagcaaatttgtctcattaagaagagttctagctccttctttaagagatttgttttttctctccacaacaccattttgctgaggtgttcttggagctaaaaaattgtggtttatttcattttctttatagaatttttcaaaatgctcattttggaatccaccaccatgatcacttcttattgagataattttgcttcccttttcatttgaaacaagcttggctaattttctgaaagcaatgaaagcatcactcttggatcttaaaaacaaagtccatgggaatctagaatagtcatcaactattacaagcccatagtaattacctcctaagctcatagttctagccaaacaaatctatgtgaagcaactctaggggtctcgaggtagaaacaaggtttttattttgaaaagaaatcttagtttgtttccccttttgacaagcatcacaaagtctgtaattttcaaacttaagtttaggtaaaccaataactaaatcttttctaataagtttgttcatgtgatgcatgttaatatgactagctctcctatgccatagccatgattcattaaccttactagacaattaatgttgtgaatgaatgcatgatctataaagagtaagtagatgttaccctttcttttacctacatggataacttcaccagattgaccatcacatatcaagcagcaatttttattgaatgaaaccttgaatcctttatcacataattggcttatactcaggagattgtgctttaaaccttccacatagagaacatttctgatcatggttttaaagttgtcttctatattgccttctcctattatcttgcctttattattgtctccataagtgacaaatcctccatccttcaaagtcagatttgtaagcatgaacatgtcacctgtcatgtgtctagagcatccattgtctaagtaccataatgatgattttgctctaagacacacctgcaacaatcaaattaagtggtagggaaaggtacccaattaacgttgggtccataagggttagctcttttcttctttttctttggagcccaaatgcagtctccattaggcacatggaaccttctagcataacacttatgagaagtgtgaccttctttcatgcagtaattacaaatgatagattttgatcttatttcaaaacgagtcaatttggtgtactttgtttttggaggtacaaatttggtatttccaaaaggttttacttgatgtttgtaaccccaaccagatttatctccaacatatttttgtacactaatcatttgattcaaattgcattttcctctatagattcttttcataagatcaaccaaataagaattttctgaaagtaataacatatatttttcagattgactctttttgaaatcatcaaactctttttgcaagacattgtatttatctacatttgaagaggaagaagcacacacacacacacacccccattggctttgtagcttgtaagaattttttcattttcttctttttttcaacttacaaagttcagcttgttgttcaacaagtttagtggtataccatttaaggttaccttttagcttattgttggagattgcaagattttgagcctcttcatgcatatcatggaaagcatcaacaagttgatcaaatttaggatttacttctgtttcagcacttgagagttcttcatcttcatcaactattaatgttagacatacatttgcttcttcagcttcacttgatgattcagaagttgttgagccattttcctccattgcaatataggctttctttggctttccttttttctttgctttcttttcacctaattgcttttttccaaaatataggacattcaaatttaatatggcctggcttaccacattcaaaacagctgtagttggtgttgttgttgttgtcactctatttgttgttgttgaactttgtgaactttttgttcttgttatttctcatgagcttgctgaatctttttactattaggtttagattctcatcaccttcttcttcacttgagtcttcttttttttccacatttaagtcttctgctttttatctgcatctttagcatgtgttaattgagacaattctaattcatattcaagtagcttaccaaatagttcatccatggacatctttgaaagatcttttgactctttgactgttgtcacctttggttgccatggtcttgttaagcactttaagatcttgatgtttaattctttagcattaaattctttccaagaccaagaagatgatttacaatgtgtgtgaatttgatttggagttgagatatgttttctgttgagttcatcttgaacatctcatactcatgaattaaggcatgcttccttgatcttttgatttcatgtgtgccttcatgagtaatatctaacatctctcacatccccttaacacttttgcacctaaccgttctaaaaaattcatcagatgaaagtgcagaagtaatcatgttcttagctttaaaattgtattgcactactctcttttctgcatctgtcatctcatcccattctctgggaatcatatcattaccaacagttttgataggaaccaaaggatctttttctattgcattccatgcaccaggatcatttgattggatgaatatctgcattatgtttttccaaaaactgaaatgccctccttcaaacatcggaggaggattgagggagacatcctctttgaagataatttgtgtggtattcattttctttaaaaaagatagtgatcttgaataacactcaagaacttgctcttgataccaattgaaaacaatatgaacacacacaataaccaagagggggtgaattggtttaaacttgacctttttttaaaaaaaaatattttaaagaatcagagttataagatcgtatcacaattaaaccaagaatgatccaaccaatcaaaccactcagctcaagaaaacaattccaaaaacttaaccttgttgagtaagaaagatttcaccaaagaatcacaaattaagatagcaagaagagattaaagaaagtaatcaatacaagaacttatacttgttcacttctcacctttgagaagttacatctagtttcttctaaccaaacttagttagagttccactattcataatattctttcttacaagcttattacaaatcaccattaatcaaacctagacttagaacagaaatctaatccccttaaactcctagtgatcaagacatgaaggacctttttctacaattccctttaaagaaacctactctagacaagccttaagaattctattataatagttacaaacaaccaaaaattctaaaatgaatttacaagcaaatttaatggagagagaacctgatgattcaatgaatatgaatggatatgttttaccaatcaggtttgaaatgaaaacaagtttcagagcttcctctccaagtacttctttaatatcttgcccaagaagaaatctttcaatgcaacatgaagatttagaatttgtgggacaagaactttagaactcagaatatcctttctcactttagaaggcttttgaaaacttatgaaaatttggtagagtaataatcttatttttcaaaagacccaacaactatttataataaattgttgtaactaaatgtaatcgattaaatcgtcaatgtaatcgattaatttcacttatttaatcgattaataaccaattcaattgattaaagtgttgttgaaccttttggaaaagatatatgaacaaagtaatcgattaactcactatgtaataaattaacacagaaagttttgttttccaaaacgcgccaagtaattgattacaacaaatcgtaattgattatcacaggaagacatttctgtgactttgtgaagtgtaatggattaccatatagttgtaatcgattaccacaggaagacatttctatgtctttgtgaagtgtaatcgattaccatatagctgtaatcgattaaagagttcatcaaagcttaattaatagattaccattagctggtaatcgattaaaacagagaaaatatgtttttccaaaacataagctttgaagattttggtttttcaatgcaatcatgaatactttaaaatctttttcacaaaacatatgccttttgtaaaaccatgaatttaagccaatggatgatatttatgcaatacaatggatcattagatgaaactcttagacatctaaagattacatatgccttcaattgaatggcatgtaaaagctaaaatattcaagactaagagcctcaacatcttgaccctcttcaagctccccctgtatctaacagaaggccttgcgctttgctgttactagtggatgtcccgtaatggcttcctcacttagtggccaacgatgctccaagctctagaatctcggttcgccccttccttctacgacgatccttagggggcattgttcaaactctatcagcgaggctctattaatgagtacctgaatgagtttgaacgccttgcgaatagaatagtgggcctcgcccctcttttgtcctcaactattttgtctcaggtttaaactcgagttgcatcgcgaggtttaagccctccagccactctcgcttctccaggaagccgtcttggctaaattacaagacaaaatccacgatcgtcctcgcggatcctgccatccttatttccaggttcctttgtggcttccacctccaaggtccctgtcaaacgtctcttagtcgaggaaatagccactcgtcgagacaagggcctctgctaccactacgaagagaaatgggttgtctaccaacgttgtaagccgcacctccacctcttcatcacagatgaagatgagaaacacttgagccatgaacatcttttggggtctaaaccactagatgtcatcctctccatgcttttccaagcaaccacccacaaatcatcctcaattcattctctgtgatgcccacaccagatatattttgcatctacgaccacattcatcaccatcatgtcatgatcattgtcgatggtggtagcactcacaactttattcaggagcgtgtcgccaaattcatcaacctccccacttccatgacgtcgacattgcaagttatggtgggtaacgacagtccaatggattgcgacaccacgtgccccaagttcccatcgccatccagggtcacacatttaccctagacctctttaccctatccctcagtggtgtggacatagttttaggggtccaatggaccaaatatttgggcccattaaccactgactacacctcccttaccatgtccttttcccatttgggccggcctatcaccctccacgctgatgtgtccctccaaccggactctagtcaacccaacaagtcaagctcttaatccaaacacaacgcatttatgctctatttcacttaggttgtatcctagacacgccccaaactccttcttgctcaccatcacccaacaaccctcctccacctccagccatcaccaccctcctctcgcaacttgataacctttttcaagaacccactcaccttccacctcatcgttccatcactcaccacatacaccttcttcccaactccagccatgtgaataaccttactgatatcaatattgcctgaaaatagagctggagaagcaagtagctactatgctcgatgctagactgatccagctcagttagagccctttctcttccccagttcttttggtaaaaaagaaggataccagttggcgatgctgtgttgattattgcacactaaatgcaatcacagtgaaagacaaatttcccatgcccaccacgatgaactcctcaataagttcgggcaggcttcctagttttccaagcttgaccttcgccaaggattccaccaaattcgtatgtaagaagatattcctaaaaccactttccttaatcaccagggtcacaatgagtacaaggtcatgtagttcgatttttgcaacacacccttgaccttttaggcgaccatgaatgagctccagaagccttttctccgcaaattcgtggtgattttcttcgatgatatactggtctacaactcttctctacactcgcatattctccatttggaagctgtttttacatccctttcgcagggatagtttgttgataagtgccacatttcagttaatctcatgtttaaaatattggcacttatcttttgatttctttcatttagcttataaatttccctaaacctagttaattagcaccttatactggtgtttaaagtgtttcggaagattaatccaaatcatgttgtgtatttgatagattccgtggatttcggaggcttccggatatcaaaagaaagcaaggagggttacatagcaagcatgagaggtgcaacaagcatttcaggctcagaaaccgacatgcccaaagctttcttcaacattaagactttaactcgcccaggcgagtgaacataggcaaaatcagtggcctgggcgagctacaagttccaaaaacataagttaagctggcccaagcgaccaaaacatgaagaaaatggtggcctgggcgagtgaagctggcaggaggcaaaaacctataaataggccacgaaaatggagaggaaggcatgctttttggaggtttcttcctccctttcttgctttaggcttgttcttaggtgttaggtacttaaatagtaggtttaagtaggttaagaaagtgagagaagtgagatttagcgtggaagctctgccggagagaagcgaggatgggaacattcagcaacttcttccgagaggaggttctctccatgttgggctagcttcttagaggttggatgtaatcttcttaaccctatacttcttttaatattcatgcatgagtcgttctatttcttattggtagtttcattccgcgcttaatgcttgatcctacttgatcactagtatcacgaacttaaatccgaagtgagactggaaagtaatcttagggtttgaactgaatgaaattactcgttacgttacgttgctaggaatagggcataatgtttcgattgcataaaatcacgcgattatagttcttaacgctggggtaatttacttaaatatgcgagggatcgatattcggtaaaatatccttagaacttgaatgcgaggaatcgattcaaggtaacttagtgtgcatcaataaaaatagacgataatttatgcatggtaaatattaattgaatataggatgttaagaatgatgaaatccaatcccgctttctcataaatatattttcattttcgttaagtttagttagtttactttacttgcatcaacaaatgaaatatccttcaacctacttgtacatatctattcaactatttaaatttagttggattaactgagtaagctcaagtccctgtggagacgatcttttataaattcgaaacttacaacgatagaacggtatgcttgccgtggtttaaaaattcctaacatttgtcctgcaccgttctaaatgtttatttgcccgaaactagttacactacctcgaccacattgtttcagcccatggggtcgcacttaaccctgctaaaatccaggccatggtagattggcccgttcaggcctcttcttccgaacagggtggcttgcttggcttgattgatttctaccattagtttatacggggatacaccgtcatggtcgctcctctgacaaacctattatgcaaggatcaattcctttggcatcatgaagcccaactatcctttgacaaactgaaacagctcatgacggaggcaccagtggtagccatgcccgatttcactattccattcatcctagagtctgatgctttgagtttcccaatgggggtcgtcctcctccaaaatttccacctcattgcattctacagtaaggtgtaacaccccttatgcatctgatgtatttacagttatttaatcatattagcgcagtaattaatttaaaagcaattaattaaaaccaacgaaagcgttttcaaaacatgacatcatctacattttctttgaaaatcatattcctgattcatcatgtatggtaagtatccaaagtcacatatacgaatgccaagacatcgcaactagaccctacgatccagataacataaagaacgataggtaaaacaataatgtccatacagatatatcaggagaatcagaagccacatgtatatatatatatatatatatatacatacatatacatagtcaaaacaatcactaaggctatacaaaagaataggcaccttgtgccatgatcccacagatcacatcctcacaagagggtacaaaatatacaacgtcggtacatcacaatgaatataggatccaaaatataggtgcacacacatcttctctcgtaggggtacaaaataacatcatatacataaaacagtgagccacaatactctcaaagtactgcccacgcaactatacagtgtctgtccctattggggcctcctgccctgggacccatcatctctaccaaatgtatcacctgtaaaataagatccccaataggggtgagatacaatctcagtaagctcagggttcttggaggcttctcctcctcctggctcacttccatgatagcatatcatcaaaggcatcacaacaacaggtctcctggccctcacaacaacacatagacattctctagctctaatgtatatctgcggtatgatgcccaccaaagatgcatcatcatcagcatcgagactttcagtccccagtgtgaggccggaactcacacccatgccatcccatcgggagctaccccattacacatgaatgcatgtatatggcacctccgagaataggcttcaaccgtgacgggaccacttatctatggtcttaagggatcatacaccctttacgtgagccaatcgactaggagttgcattctactccgagggaggtccatatctatctaactggccagaagatctaaccgaaaaacaaccatatacaaagcaaagaaacatgtatacatattatcatgaggaaagctgtaacatccaattcaatgcatatgaatcatgtatgcaaccatcactccctcggagtgtggtggaactcgaaggggaaaaaccccaagaactaaagctcacctggcaaaacagtgttctgttgtcctatccctgaactgtggcctccgccactaacaccctcgctgtcacgccctatacaaaggcacacaagcatgaatcaacaaccatcctatccgtataaggcatttaattatactaaaacacgcagaaaacataattgtcatgcataaaattatgcagattttgtacccacttagaaaaatagtaaatccctgtaggaagctcctaaaatcaaggaaatttacaggcatatagatctatctctcatctttcaaacaagaccggtcccatccaatttcattaaccacatcctttgtaacaattaaaataacataactgccacacactatattagtgttgacaacaacatatcagtccaaccaaccattttcaaacgcccgccaccaccaggatactaatcctaatgatctgtgcttttgcaggtataaagtacacatacatatctttctatttccacaaaaatcattcaatttggatcatcctagaatgagatataatttctgcaaggttgccatttgcaccagtaaaatttgataaaaacagggtataatagcctgttataactctatacaattaattccaggaacctccaaaaataggaccaaaattccaaaacaaacttaaatctcttagcttttaaatggcaccatttttaaaccatttggataccgatagctcctgttatgcacaaaacatcatggctgaccagattaccgttctttgctatcaaatacatttatgtatggaacaccatttcaacacttatatcaacttctacacactccaaattatacattataactgtcccaacctcccaatactcaacatttatcaatttcactccaaaccctcatcaaaccttaccttaactttatgatttctaagaatcaaggagaaataggaggaggataccaaccttagagctcaaagaatcaaattgaagggtggaccaagctctttatatcttccaattctgcccagctactccaaatgaagtgggtagctcctagctccactattttctcaaatttcttacaaccaatactcaacaacaataaaggataaggagaagagctttctttcttgcttaatttgtgtttccagctgctaatcaaagagtgaagagaaatggtgcttgggtgtgaaggagggatatgagcatgtaggaagaagaagaagaaatgagagaagtgtggtcaaatatagtttcaacatgaggaggggattgcattcaacaatctcctattcacaccctaacctctaaacaaagaccaacatgcccttcctttcattaatcctcttttattaatactaagcctcttaattatgcaaatatcactcgaattacattaattacaattagtgacattacataaggcattttgccctcgtcttcaacaggcttctacatacgttcgtgaacttcatgccatcacctcgacagtttgcaaatggcgtcattactttctaggtcacccatttgtcatcctaacaaatcatagaagcttgaaggatctaatgtcgcaagtcatacaaactctggagcaacaaacatacctatccaaattactgggttatgattacactatccagtacaaattcggatccagcaacatcgttgtcgatgctctatcccagaccatcgcctctatcaatagtcaactcttttactgtcgctccccaatttctcgtttttggaacaattgcaaaaatcggtccatcaaaacaacgactacaaggatttattacaacaaattcgtcaacacccagagacacacctgggtttcgctgttcaccacgacctcatctttctccatgacaagattttttcacttcaaataaccaattcacatcccttttgctggaagaatttcacacaactcttttgggaggccatatgggcatggccaagacccttcaccatctttaggacaactttgtttggccttaaatgcgctccaacatttgtcaatatgtctctcagcgccttatttgccaacaaacaaagtatgaaacaaagaaaccagtgcgtctactccaaccattgcccactccttcatcaatatgggaggatctatcccctgatttcatctccagcttgccgctatccaatggctatactaccatacttgtggtagtgggttgattctctaaaggagctcatttcagtgcccttcctccacagtacattgcccacaaggtcaccctcctttttttggacttggtatgcatattgcatggctttccccatagtttggtttccgacaaagatcttctattcatcagtgccttttgcgcgaactgtttcgcttgagtgggacaaaattacggatgagtacttcctaccaccctcaaatggatgggcagatggaagtcctcaatcgcatcctcgaacaatactttcgttcgttcgtccaggacagacgacactgtggttcaaattccttgcccttgtggaatggtcctacaatacttctattcattttggcaccgctttatccctttttgaggtgacgtatggtaagcaatcaccctccattccctactacttgcaaggttcttcccctgtggaagtcaccgattctttgctcgccacacgggccgccgttcatgcaaccttgcaacgccgcctctctaaggtccaggccgctatgaagcacgtcgttgatggccacctccacgatgttagttattcggtcgatgattgggtcactacaacaaaattgacttatacctacaaacaaaatccgtcactataagtcaataatttgtaggtaaaagtataattaacatttacctacggacacttttttcgtcaactttgagggggtgtattgtgacggttattagtctgtatgtacaagttttacctatggacatatctttacctatgattatagttgtctgtaggtaaaagtcattaatgtatacctaccacctctaactgtaggtaaaagtcattaacgtatacctacaatccctaaatgttagtaaaaatcattaatgtatatctgcagcctccaactgtaggtaaagtcattaacgtatacctacaatctccaactgtaggtaaaagtcatataataaaaattaaactaaatatattttattttctcattattaaattttataaaaaaaataatataattgaaagaatgattattaaatattgaataatatacaaaactttacaatcttgatattttgaaccaacttatattttgaaccaagccaaataaattcataatctaagaatgcacaagatattatctaaatatcaatcattaaaagtgataacaagctatcacaattgacaaaaaaacttggccattttgacctttgaggtatggttttgatttaatacaagctcaaggttatatttcaagttccaatctccataaaaatgggaggaacaacaacctatatttgaggtaactcatacaatccagaccatatacatgttgcaccgtcactgctgcaatgtcccctttaatgctactccaaggaatccctgaacctggcagttgtggttgtgctggtccttctttactttaggaactacacctataagttttgtcctaaaatgtaaatctgctgggaacaaatccattcatccataatttccaaggcttttcctagggttaatgggccgatttacaagttctcgtctatttggagtaatgtcgtcgtcctgcgggatcatgatcaaatcaacaaagaggcttacaaagatatcaagcccaaaagataagtcctttggtctctcatctcatgccacatacgactcctagaatttggcaattgtctccttttactagaagtatatagattgaacgaaggaaaaagaatccttaagatgcttgatacttgcacaatacagagaacaagtcctttccccatacttcatgatcccaataattagcatgggtaaatggaaatatgtgaaagccaattacctttctaagacaaaataattatgcaagacctttccactctagtagtgttcgggccgtttgagacaacaaaaccaataaattgccttagccataattccttgttttcttaggcatactctgtgtttgtatccaaatattgggtttatatttataacggtcacccaatagtgctaatatgatctatgacattaggctaaccaaaaccagtcctcgtatctcccatttgtcccgtctttcctgcaccggatccgggatcacttaaactagcctcctatactcttctatggacatccaagtgcctaccactgaaataagaaaatatagacaacaaccaacgtccatgtagagacgaagaaaccataattttagattattgagtatactttatttttatataaaggtgaatttgaaaataagtaatgcattaaatatgtttgtagtttgtacaaacagagacagagtaaaccataaatctgttctatgtacaaaaaaaaaaaaacatcaatctgctcctcaattagttgtctcctaaatactctctaaaataatgaatattcgtcaatttaatcctatgtcaatatattttatgagaaaaaattatgtactaatgtaaaataattttatacaatcatttaataaaaaccaatttttaaatactaagtttgttaaattttataaaattaacttaaaaatcatatcaaatttataattaactgagaatgcaaattaaactaagttatactattagtgtttcaccattaaaataatattttataaacatttaaggtttaattttacagattttttaatacttgaggcactactatgtgcaacttcaaatatttaagggattaattacataatttcctttactttagtacgcgactatttagtagagatagtaatattaatattagctaggtaagaaattgatggtttattccatagagaaatgtccacttttaatctaaaaaaatccttttaattcctatttttatatatattagtaataagctagtatgactctgaacttttttctaaaaaaacgtaaaattttgggtcccaattttaggaaataaggaccagacatgacacatttaaaaaatgtgaaacccaaatgagaatttttatcaaggcaaaaagctaatgagagtataaactagttagagttcactactagaaaaaaaaaggctatttatatgattatttgacattttttatgacgattttcaaccatatttctttgaaattgtcatcattgaaagtgttgactttccatgatggttttcaaatcgtcttaaaaacttgatttctacatcgatttgcatagaaatcgtcttagaatatctttttaaaaaaaataaaaaattgatgattcttagatgatttttcagtatactatcttaaaaaatacttttctaagatggttatgtgaaaaatcgtcttagaaaatctactttttaagacaatttttctaaaactcatcttaaaatgtacactttctgagacatctttttaaaattgatgtttttctaatgtttatttacattataactaaaagttgttaatttttataataattactttaaagaatgaaaatagaatttaattaaaatgttatgccaataaattgtatatagatttttttactatttaccaagtacataattaaaagttgttaatttttataataataattattataaaattgtatttaaaatgatttagtcagaaaacaagaatatgtaaatgagatgttgtaactataacatgtggtgagataattataaccaaccctctaaattaatttgacacattttatatataacagacataacatgcaaagagtattttttccactggtgatccatctaatatataagaatgtgtttcagatgaatctatgtggtccatccactaatacctcctacattgtaaataaagaactcaattaaattctattgagtctgactcatagtcattatttatcaaagaataactctggttttttattctctataatacatacatatgctttctcccctgcaccatgaaatcacctttaaaaaaaaattaaggcacttgcttttttttcttttcaccctttcttggctcactttttgttcataacctatcatgtgtggatagacaacattcaaaattaaacaacctacaagaattattgtgtctatgaccacaccaatgtaataaactaattaataaagattatgaatccacagctgacaaggtacaaaagtgcttcatgaagtattttacacaccaagcattttactgtctaggatttgtctatcctttatagtagcaagcatctcctcctctttctttaacatttccaacagatctaatgcctgaatacgacacaagataacatgagaacattgtaaatagaagtttcgaaaccttaaattgttacatgagtataaactaaccttacaaattgccaaagataaggtagggttccaagcctaaaaaaataggaaaaaatgttaggcgcctctctacctaacacagactaataatgatggcactgacattttcaatgtgaaaaaggaacgattacaagcacccaaaaatgatcaacatgaagccatccttactaaatgtatcaacctaataaaccaacacaaccaatttgaataacctgtgaaacaccaattaggaaagagaaagttacccatacaacactctttaaatacctatgtgaaaatgggaaggatattcaaaaggagcattagtatgaataaactgacactaattcttgattttcttttttaaggaaaacactaattcttgatgaataatataagatcaacattagtataactcaaataatgaataaatacaaaaatcctacctaactaagtttattctttatttgatcactgtttacagctcaagagaatgggaattggagaagtgtcggcaaggaaaagtatagtccacctttaggcacatggtactcctcactgttatttctgcagaaagttaagtttatatggacaaattatttacctgagggatattgtggatggttttcaacccctcataaactcttcaagggcaaccaggaggggagaattgtcatcaaacatacaacccacacctgtctgatgcacccgtgtctaggtcctaccccgagggatcaacacatcttccctttgtgctgacacaggaagcagaaggaccaaccttaggctcaggaggtggtatgagtccctgggattgcatttgggactgcatctggctaaaggacaacattagttgtcgagtcacttttttagggatcgactgctccagcttgtccctgattttctgtgtcagcttctctgtaatattttttgttcattgatgcaacagttctaggttgatcgacgtagacgtgcgggagtttgctgaagtcagtccaaagtattttctaatcatcacagcagcacaaacacggccagagtgctctagtcgtccaatggtagcaatcgtttcttttgtttttcctccattaaattttttttctagtaaatcataactccacgagacaacacgtgagggacaatgtttagtttctggatggcctgagccttctttctaacaatcctgtcacaattagacagaaacctatcaacaaaatatgcttaaaaataatgcataattgtcaaattcataaaaaatgcaagtcaactaacctcccattaagggtctctacgactttgacaaaattggttccactttttgttgctaatacaatacttttcacagacagttcatcatcctcctccttgtcttgtgccaaagcccatttggaggtcaaagctgacttaaactacctttattgctctcctaccatcttaaggattttcttcttcctcctttggtcagatggttttggaatatcaaattcagcctgcgatacaaaaaatacatttaatagttagttaataacattcaacattttaagatttttagtacaaccaattacaataaaattcaacatttaattcaaatacctgaatgtcctcccaaattaaatcctttgagttgcaagaacttctttccagttaacaaatgtaacatccaccttgtcccgagcggcgatcccaaatacatccttaatttctttccatggggaccatcagctttcgcaatggcaggattcacatgaacaactgatctctctatcccgacatgtctggtagccaatgatctgagccgtgttgcttttctatcttcttcgacgtagaaggaaaaggtactgacttaggaggagaatgggagcttaatggtgttgtcatgtgcctgttaaaaaaacattaattaaagtcaagtcaaaagtatagtaagttatgtaattgtaaatataaaaaattacattatacaatgttaattaattctccttcatcatgatcatttcgatttgcatgagttgataagtgccacattttagtaaaaatagaattcaaatatgacacttatctgttattttaattgagttattcacaagttaaccctagttaattgatggttatattaaggtaagttatgctttcatattttgaaaagatttcgtccaatcaaatgttttaattttgctagggttaaaggttacggaagaatcaagcttgcgaaaaccaagagccgggagtgaactaagcaaagaatgaagtcccaaacagcatttcaggcccaacaagcaccaaggcccaaataatccttcatgactaagcttttaactcgcccaggcgaccagtttatgcctattttgctcgcctgggcgagcaacaagttccaagaaagccttttagctcgcccaggcgcccattttatgaaggaattggtggcctgggtgaccaaagcagccaggtccacaaaacctatatatatggacggattttgaaggccatggcatggttttccactacttttctatcccaatttacatgcttgttcatatctagcttgttcttaggttctaagtgagtgcagagacttaggaaagtgaggtagagtgaattgtataaggagattctgccgaaaagaggattgatgacgagcttagtcagtggttctctcgaggaggttctgccgatgttcgcttaaactttcctaaggattggacgtactcttcttatccctatgctcttttaattatttatgcactgttctattccttattggtgattttattctacatttaacgcctgattctaattaatcgttagtttcatgaatttaaccctaaaggctactggaaagtaaatttaaggtttgaactgaattaaatcactcgctatgttacgttgctaggaatagggcttaatgttttgatggcacaaaacacgtgattagaagcttaatgctagggtatttaattaaataggcgagggatcgatatttagtaaaatatccttaggacttaattgcgaggaatcgaattaagtttacataaacgtgtgcggcaataagaatagaaaatgcataggtaaaatcaattaaagggataagaaagacaaaatccaatcctacacttccttgacttgtactcgtttatttattttccgtaattgtttatttgttttcaatcatctttactttactttacaaacaaaacaacaaatgaatctctgtttgtatcatctgtatataactactagactggtagcaatttaaatcaaccgacgtaaactcaaatccctgtggagacgatcttataaatttgaaacttacaacaataaaacggtgcgcttgccatgaaaaatcctaataatggacgtcgtcaacttcttcttctccattgatgttaggcatttttgtggagaaaagagtgagacaagtatcaagggttgaatcatcgtcttcaagattaagaccaatggtttttcagtgtatgaccactaatcacctttcatctcaaggatcttagaacaaaaaaacaccaatttagcttgttctgccatgatgaaaggctgattttgataagctagcttcttcagatctaccaaagtaaatatgaaatcatcggtgcacagaccgatattgctatcaacctacttatacttgaaaacacacacaatgattttaacataattaagctcccagatttcttcaatgactccaaactaaggcatggacgctagacggggatcattgggattcagccctagactaaccccactgttttgcattgtactcttgtcgtcttgtgatttggtgtagaacgaatacttgttgatattgtatccctgtcaacttttaacatttcttttaggctcatctgctaacaaataacattgaagaaaaaacatagacaagttatgacattcctcactttgttcggaaaaatttctcgaatcgccacggctaacagttgttgcatcaagatgtggcaatcatgagactttaagccaactgattttagatcttttagttgcacaagactcttaatatttgaagagtatccttgtcgcactttgatacagtgcagacactaacaaaaacttgtcttctccttttttgacaaagtatgacatgctggaggcaagtatattttgttaccatcagatccttgatgtaattagtcatgtatacccatcttagctagatcttgatgagtatccaaaccatcctttgtcttgccttgtgtaacgacctaaatttctacttattctttattaattttattcttacttaaagataaattttctaagaaacgtataatagtaaagattttaaagcataaaatttgcaaaggatttgctactcgtatacatagccaatgtctctgatacaaaagtttagataatacaagtacacaattttctcaaaaaaatccagcttattacatatcttcgtttatatttcttcactactccaaggcttcacggaacctgtccatcattgccatctaaaaaaaaacatgaaacaattcgggtgagaaataaatttctcagtaggcaaagctaaatcccgaccctattattaggttagtaaaatcataaaaatcaaacacatccacaagcaatatgcaaactatatgaatgcatgagatgaactatcccagggcaaatggctcccacatatcgtactgtatgtggtcacgctgagcgtggtcgctgctatagtcttacgcaaacatgcatgaattttgccatatatccttgcccttgggtactacatatcgtactgtatgtaacatcagattctgtttccccaaagcctcgtactggacttggaaacatggaaacatgaatccacctgtcttaatcacatcaatcatccatatgaaaaatcaaatgcataagcaaaccacagatcatatcattatatatatcataagtatggttacaccaccatattttatccaataagcttttataagtatggttacaccaccataccttaatcaagattattaccaaccttatgcataaccagagaataaccttaactacagaaaaattatgttagtagactaactaataatcctcaatataaataatatctaattccttcaaacctttacaagcaaagattcacacctagtatacacactaattaatcttcaaaatcaaataattaatcctcaaaatcaaatcatcaagtatttaaaccattcaactccacaccattctacttcaaagattaaattaaaacatatccataaaatatagacagatagtccaaagcatcattaaaatcacctcaaaagatcatcaaatagacttccatacttccctaatattgatgggtataaatcatagcctatcttatgacttaaatcaacatattcttatcaaagaataacttttaaacatgaggaaattcaagcctaaatatcaaccataaatcagcctactaaaacatgtaaattaacctaaaccattgattaactagagatttaaacttcacctacctcaaatgagtttgagtcttgatatccttctaagcttgttaaatccttcctaaggttgtttgcctctacacgtgatttcttcaaggtgatggggtttacttgatttaagctttgaagggaaagatgaaatgaaatgaaatgaaatgaaagtggtgtgagggagagagttcacgtgaggtttggagaaaggagtggttttagaattggtttgcacttaggttcctcctcctccctttatatagtgttgaagaaatgattacttagagaaaaatctcataagccatcattatttctttacaagtgtccctacacttgttaaaatcttaaggcttccttcctttcttccttccaagtgtcctaccatttggcatgatcttaaagcttcttctcctttgcttccaagtgtccaaaatcatgaagtttctccattcctcttgtattttcgtggagtagctcattcttgagtttatcccaaacctattttagtaaaattctatttctggattcgttaaccgttggatctctttaaaattttaaaggtacactactatctcacatatgtaacttttgaccgttgggattattgaaataatgtctagaactatccacgtgcaagatggaaaagtgtagagaaatcttggcttgatttttatgttaccttgcatccatgccatacaagtgtcatgccacttgtttctatcatgtggcttgctttcgaagtggcttatcatgaagtttcttgactcttctacatgttttctcacgtgaatgaccaatctaaagggaaggaataccaatttttcttcctttcatgccacacgtggtcattttttgatgatgaataaaaatctagtttcaatatggcattttcttttaaaaagaaatccaatttaatttgaattattttatctaaggataattgggaataatagatatctagatgttcctaagaatttatctcaatgataatttaaattaatcccaagcagtcttatacaggacaattcataaacctttcattctagactacatcttgatcttgattttgattggtctatacttcttctgaccatcaaaattactaaatcattttattaaataggtatatccatcctataattaagagaaaattctatagatttcatgtatcatttttccatatttttctaatgcttgagttttcttgaataaaacctcaaagttgtcatcttataaaatttgtggaaattttattatacagttttgtgtcacaaaatttgttgatacttagtcggctaagtgtattctataatttcatcaagtttttacaaaatttctaaagttatttgagcatttttggcctaggggcattttggtaattatgccattcaacctaggggtattttggtcattttcaaaaatgtccaagggcatttttgaaattttcatcttaaggattttctagtaatttctaccatatggaaagagtgggatagttatttttctctaaacatacttctatccaattatcatcacatttttaaaattttggggatgttacaccttgaatgttaagaagtatgctgatgacactgccatacacatttgtcttcacatgcataacattgattttacaatgtctaacatctagatcgaaccagtatggaagataaaaatatcgatcttttcttccatatgaaagttttacttgtcaactttgggtctttccaaatatagtattgatgtcctcaactcactcaagaacttgttaactagttaacagtatcgacacaatttcatgctcttgacttccatttaaagttttttccaatctccagtaagggtgataaggtttcagaaaacatcgttgccaagtgtatactatttttcttccatgtttcatttgtacatagcttgtgtcttcttcactgatagggcatgcacgatgacccttaacattgtatcaactcaaaatagcattggacgcaacttaaatgtctcatttcgatacccatcaaacatgaaaacctcctcatcccacaactttgtcaagtctttaatcaaggcattgagataaacatcgatgtcatttcctgattgtcttgggcccgatatcatcatagacaacatcatgtattttctcttcatgcataaccaaggaggcaagttgtaaattactagaagaacaggccatcaagtatgctgagtgcttaaactgccatagggattcaatccatcactgccaagtccaagcataagatttcttgcctctttctcgaaatctagatacaaaagattaatcttcttccattgggatgaatccgccggatggtggagcattccatcgcaatttctcccatctgcatgccatgtaaggtcttttgtgtcatctccattagcaaacaaatgcttaaatcttgaaatgatcgaaagataccacaacaccttcgctgggggcctttctttgtgctttcgttactgttacacttgtcatcatccttcactttgtacgatgataccccacactttgggcatttatgcatttcttcaaactcatgtctgtacaatatgcaatcattaaggcatgcttgaattttctgatactccatacccatcggacacaatatcttcttcgcctgatagtaacgttttggcaatgtattttcctttagaagtatattctacactacctgaagcagtgaagtgaagcttttgtcactccacccatatctagccttcacattaaccagacttaacattactgacaatagtgtcaatgacttcttgcaccccggattcaaaggcttctttgaatcactttcctaggataaaaatattttccattcttattcggtcgacttctttcgaggcaaattccaagaactgttcaaccccttcctaatacgcagggctcgtgcaacttgcattcatccaacttcgatctatctaataactttgtgatactcacaaagttattccatatatgaaaacctcactgttttcattaaaggtttggccctatcccattcaggaagacaatctttttataatagattcatacatgaaggttaactttcttttcttagagttggcaaaatttcggcaacatttcccattgatctccaagtacacgacatgaaagcggtgagatgaattccaccacaaccaagtatgcacccggagaacaaagtgaaatgcaatataccaaaatttcatcaaatttaacaaaataaagttaacctatatgtatgaatctgctataaaaaaatgactcttcccaaactgtccaaacggacaattcaagattcaatacaacgattagtccaaactgtctggaagaatcattgaattgaatctcaaacggaaaactaaggttcactcataatgaacataacttgtatataaagcaatagtcattaatcaaataacacaagttataaaagcattcgtaataaataaaaaattgggctaaaaggagtatgcagacattcatacctgtgatgatggtcactaacaatctccaacaatgaatgttgtgagcacgatggaaatatgaaaaggaaaagtgcctacaaattacaatcacaataaccataacaagaagaaataaaaaaaactcaaaataccttaacattggttttcttaaaaacctgcttagaacttaaacctatatattaaaagacaccctttgaaagcacttgtaaccagaaaacaataatttctttttctatgcaattacatgagtggctattaattgttaactatgtatgtatgaatgcgttttaatggtgacgataagtgtgcttgtgagagttacaagatcaatttaattactaggattaggacatatccaaatctaacatttgtttatatatgtcatatatcaatcaagaaataaaactaaaaacaacctaataatggttaatattagttagaagatattgtaattaaaaagagtagaaagttccattacaggcctagatataactataattagataataataagataagttctacattaaatgatattaaatatttaatcaacaatagcagtgtactcttattgatatagtctgaggtcaatttcatgcacaattaaaaataaaagaaaatccaatgcccctaaattacatgtagtaacacattaaaatcactttagccaccttgaatcatttaaattcagcacaaggatacaaacgtaaagagttttgagatgaaatttaattagtttcactagcatttgtacaaaaacatttatattatgtttagtcctattaatcagtctgagtaatatacaactaaatttgacgtactttaaaacactacttaaatggagttaaggtgaatgaaagtagtgaatgtgtacgaccaaccttttccattaagaaaaaacatttaaatagaaaggaaaacgaataacaatacatatttgattcaccatgtctcttagcattagctcttaacctctcgtcttcttctctactccatacacgtttcttgagtccatttttatcatagaaaggagctcttaccatttctttaagattaggcttttgattattattgcaaaatctgaggaaactaagcacacaactcaaagcaccgtatttagaatttctcatccatttatactatttattggaaattataaatcaaaatgtgtgccatctactgatacagatagttccattcatttatcaatcctaaataaataaataaaaaattagaccgaaacccatctaagtctttgtatataatatttgtttaccatcattttttttccaaaaaggatcttattggcctatttctgatgtcacttagaaattatgatattaaaattaattaatgtaaattatgtttagtttatcgtaagtaattgcttaatgtcagaatgcatttacaatttttccaatttcagagtcctagcttaaataattatatgattatgttttattagattgagtggatcataaattagttgaaatacgataaactaactcaagtatcacctgaatgtaattaaaatagtcataaaaataaacacaaagagataagattttttatatagatattaatgggtttttattgatgaattggtgatgcaagttaagttgtataatactatgacctgagcctagtctaaatgggaatggatcctcttagtttgaactcattgaatttatcactttcttggtcttagagtacacattcaaattaccaactgtgttggatgcatcacagtacacaaatcaaatattttttaacacctaaagacaaataaaaggacacaagatgtgccccattcaacagtgtacaaacaaagcatattctggtaagtaatatcaagagggaaaattagagaaaatataacaattaaaagttcctagatagaataacagcaacaccttattactttgacttcaacttgattttttctcaactataaatagttttatttcaataactaaacatcctaaatttaagtaaatcttcatttaactaaaatcaatgtagttgactgaaattctgccaataaaataaatatgcactaaaacaataagaaaaactaattagaattttgaaaaatctccaaaatagtgattgtagtgggagtgcttatgcatgcttgtgttgtagtagtagctacattgctcagagcagcctcgattttatctcaatatttattattatgccctttaaggtctcactaatgcagggcaacgagtataggtgatgcttctaattattctttcctgatttcagaacaaatatatttttcaaaactttttttatatgcctgagatgtaatttcatgagtcacgttttcgttttcgtgctataacccttctctgatttcatatttgatatatatatatatatatttccatatcagctaagtatatattcccataatcagctcctttgacccaaccaaattaccagtgcacaaaaccatcaaccaatagtactagtctccacctaccacactaaccccgaaagaatatctagtgagatgtgccgccgcggagagttgaatggccgccacaaagagtgatagttagagttagagcgagagtaacgatttaaggtcgagagttgaagagcgagagagtgagtgagagtcagagtcagagtgagtgtgagaagagggaaaacagattctaaataggacaaacgacaaactcaacattggtttttataaaaatcaatgttaacatcaaagcacaacatcggattttgaaaaattgacgttaacaatcctaaaataacatcggttttttaaaaactgatgttaacaatggtcacattaacgaattcatgttaacatcaaaattttcaaaaatcgatgttaacaaaaccatgctaacatcgattttttcaaaaatcggtgttaacaaactcatgttatttatgaatatgccaccatatttttgttaacatcggtttttgaaaaaactgatgttaacgtaacgatgttaaaaccattctttctagtagtgtaatctttaggaagatgtccacgcatgaactcaatctgtctcagtcctagcttaccaagtatgagcaatgaaactttcagcagtcagcaccccatgtttgtgttcaaagctcttcttcctttccaatcaacttttccatcaacaaccagctctgctttctcctcctgcatccactccacattcacatcaacaacataagtatcttgcatgcaaatgatgagctgaataagtaaatggaatgcatacaagaaacttgaaaatggtttgctacatcatggggttcatgcatgcaatataataaacaaagcaaaaataatgaaataccatggttctgcagagaatttttgagtggccaattcaaaagaaattaagggaagaaagtattttaatatacaacaggacaaaccatttgatctcttccctatatatatatatatatatatatatatatatatatatatatatattatccaacataaactttaccttaagtgccttgcctctgagaaggatgaaacccatatttccaagaagaagggtaaaaaactgaaaaacccaagtgaggtggtacatactcatgccttgtgaaattaaggaatactttagttaaaatttaattcaaattttggatctcatgcaaagaatgaaaatttcaccataaacatatcccatgatgatgtaatgtctacaaccattagacattaggtttcccaaatttaccttgcaatgaaatccaaacttcaagtaaacttcagatcacaagcaatcaacacttcttgtaaaataggtttgtttagaggtttataattgcagaaatggaagatggaagaaaggttagggatgaagatggatgacaccatggaaaagctttccaataagcctaggaagaatcaccacaatagcattgagaagccattgataagactcaagaagttcttgaacaagaacaagagagaaactctcacaacaattttcagaattgtattaatgaaccaaagttgttacaaacagtttttgggagtttatatagccaacaaaataacaagctaaatgacactaaatgtaatgcaaatgcaaattaaaatgaaacttaaatgaagcttgaagtgcaagttttccctaaagtgacctttggctaacccaaaacgtgcagatgcaatttctgctgaagtaatcgattaatacgttcatgtaatcgattaaatacccttaagtaatcgattacttggtcttgtaatcgattattttgttctacatcttcctggaaacagatgtatgaacaaaataatcgattaatttgtcatgtaatcgattaaaacagatcattccttatcaaaaagtgtcttttaatcgattacagacacgtcgtaatcgattaaaacagacaacatttgctaaacagacagcatttgcttgtgtaatcaattacagactagttgtaatcgaataaaacatatatcactttgttttttacaacaaacaagactttttgatgtgtttgtattgcattggtatgcttcttcaatcctagctcttgtcattggtcctttcaagctcaccaaaggaagtgcttcaagctctccttctagacctttggcttggaatggacctccaccacatgagatctttgtatctaatgaatctacgatcatcaatgaaatggaatgctgctaagagccagtttacataggcagtgtaggatcccacaacaataaggcatatgataccccatgtccaacccaatggctatagaaaaaatttaaaaaacttaatatccacctgcaattgaaggttgtcaccagcatcaacctcacttgttgccacgaaccagcaaattgtatttatcaatttcatcatgaaaaatgaaaatctcaattctcaattggaaacctagtaattgaagacttcccttgcaaaaaaagtaatagttcatggtggaatcatataataaataaataaagagttaaacataatttagcatagtatagatggtgtattagtgaattaccatgatcaatagtacgagcagaaatgagaccataatcatcatattgggtacccttttcttgttgaccttgctcgagtttcaaagtgagagaatttcccttgcttgcttttccttctacatccatggaaaatcctagaactatggaaaagaacaagtctttgctctttaaatgatcacagcgtgagctaaattatgtagaagtggaatattcagatttaaatatttggataaatatggtcaacttgacagttccttcaaaggaatggaaatgattatataatgttagctacaaacagatttttcaacaaattttattttattttttcaaaacttttagagcaggttcaatggacaatggagatggaatagtcgtcagttggttcgtttcctttgaaagttccttaagagcaaagaggcgattagtgacctggaaggctgttagcaagaggttctgcaagaaagagcttttggacaaatccgtcgtccgtgcgcaaagaggaattacttcttattttattcgattggaaatggtgtatctagatcgattcctaaagctggtaatgtcgtccatggagcgtatgaatttattagaatgtagatagatcaaaagagggaatgaagggataataataggaattatcctctcattagaccatttatcacactcatagctacagctctaacttgattatttcctaataattattgtacttcacaagtcacgttaatttgttgattgcatttgatttagatgtttgggcaaggcaagccccaggaaagtataggttggctcccagctctatctcggccgacatcctgctctcgagggggtggagtcctggaccgaactacttattgttgtcttgccccaacccaaggccgagacccattcctttgcaaacaggaccagctgacgtagactggaccttttattgattaagatatgcataaattattaccaatacgaaaatagataaaaaatttagaataaaacaatataaaaaaatatcacaacaaatataaggacagcgacctgctacaagaagagggactgggagagccagtaagaaaaagcaaaataatggaaacaaatatttgtctccgctcgcatctctgctttggaacctcatcttctccttgttgtcttcgcatctctatttcaaatccacgtctttgcatctcctctttaggttggcatttaaagctcgagttttgcttcagatctcacatttgggtggtggaacggacaaaagaaaaaagaaaaagaaaaaaagaggaaggtcgtcgggaatcattttccacggtggggcattgttgttctggtggagagaggaaaaaaaatgggagaagaaggcggggaaagagaaaacagaaagacaacagctacaaaacacagccttttgtttaaaatataataaatcatagacctaaggatgcagaactgaagtttcagtagaagcttggtttctgttgcttcctgagttccatttcaccttttcctcagcaacaatgcaaaacatctagcctcatcaattttctactctaattgaaccacccaacataaccccaatcacgaagccatttttccttcccatacctcaccgaaccattcctgagcctcgaggccaggacctagacttcatcagtgttgaacactgccacatcatcaactcccacagggaaaagctccatgatatcaagttgtcgacatgcaccaaaaacaattttactaagctaattctgtagcacagagctaacctaggtcatctcagagacacgatcaatatggttctaacttcaaatcattggtaataataaggggggagttttgtcaaacagttggtatgcgtaaagtaaagcatgcaagaacacaaactaaaattaaaagacaatgcaaaaattaacaagattatcaagggtaaagtaaaatagattagaaagcatcaatccaattcaccaacccaagctatttgaatcatcatcattcccataagttgattctaacatgaacattcattcaatctcaatagaagcatttcaatcgattctactcctaaattgattgaaatcacaaccctaactgaaatatcattcaattaatcttgtgattatcatttgaaattaagacatgaatccataatcataattcattttcaatcccaaatgcattcataatcatgaaaacataatagaaattgaagaagaaggtgaatattcaagtagaaatcgaaataccgaaccggaactccaattcttctcttgcttaagttagatccttggattgattagtgatttagccttccatgatgatcaccaaggaaagccccatgaattgagtgcagaaaaatggaagaatagcaaaatggaaataaagaagatgaagaacaatgaaaaacaaatgaaagaaaatgaagaacaggcttttgattctaaaaagtaaagaaaggaatgtaaaagttgtttattgaattgtaagtgtgttgtccaagttttcactaaagtcactaatatattagtgactaagttctgaaaataaaatgggccacaaacaaactcaacaatctaattatttgttatttacaaccatgaaagtcaaattcgcagcccaaaattacaagtgcagaagtgataacttgaaagcttaaaatgaccctctaaatgatagaattggcctcgggctatttctagcaaacttgtagatcttttctttatcttttcagggactcctagaacaatccattcggagatcggtagcaatctataggtcctacacaagtcagatacgtcaagtgagcaaaaatccgaaaatacgcaacaattagtaattaagcccacttacttgcctaggcccaaaaactgaattagaataggaaaataaaggtccaagagaggtcaaataagctaagaaggatagaaaaatattcaactaaaagcactctatcactccaccctttatccacctccctcacaccctttcatctcaaacacctcctccgcatggggttttgagagagagtgtgagttagtggcttgagacagagaaaaagggtttcttatttaaaaacctcaacatcggttatttcaaaaccaatgttgtataagtactcacaacatcggtttttaaaagaactgatgttaaaatcatcatgttaacattggttttttaaaaaacgatgttgtgagtacatcgacaacatcggttttcaaataacatatgttaaaatcaccatgttaacatcgattttctaaaactgatgttaatgatgacattttatttacaaaaatgtcaccacatattttgtaacatcgattttcatcataaccgatgttaacagggtgatgttaaaacctattattttagtagtgaaaatactatttcaagtagcgtttcaaaaaatgctagaagctactaaaaaaagcttgtttaccaaatagtaaaatgagttttttagctagtaaaaaaagctagaaactaattaaaatgtctttcctaacataatcattggtcttccactgcctatgaatttttcttagattttgaaatatagattggatttcctacatatgcgagcttgttttgtggcttttacgattatccaagcaatttgtaccatatagatctaaactttagtaaatgtttgaatgtcttcttgttaggtccaatgttgtaagtgttgatggggattgacaaaaggtggaaaagtttccctcgacgaaaaaggaagttggacatatgcaagaacttgacgaatggctaatgcatatgcaattttgcagctattgaattgagagaggaaaaattgtggaagtagaagaaacatagacttcaagggcatgaatttaagcttttaatatgttatatgatatgatatgacaaatgtaatgtgtagttgacatgaaatttcttaataaataaataaagtttattgatgtctttcaactttaagattatggggttaatgtttgtgtgatttctctatgaacttctctctgtttgtttttagttttaatttaattgatttttatgaacctaattaaatgaagtataaaatgaaacactaaaataaaacaaaaaaataaaaataaataaacaacacttgtaataaacacatgttatctaagggcctaattagaaagtatttgtagtacataagaattgtctatttggatatttgtaccttacatgtgttgtctaagagcctaattaaacaacaattgtactaaacaagtgttgtctaattaggcccttagaaaacactttaaaagtgttgttaaagctaattacccctttaatagcaggggatagacaacacgcataagtgttgttaaagacctattttaattgttgttaaaatctatttttgtggtagtgtctactgaacatttagcatgactcccacacgactctctcaaagaatatctcagcattccactgcaggtccacatctgcttgcacatctctcaagcacattactctcttagggaaaaaatatcttagtcattgggtactcgtgcccgagtccctgtgaactaacgcacaatcttgcatgccactcaagacgcacaatgctccctagaatagggttttagtcaacacctagactcatgccgaagtccttgtaaccaccacacaaaggtgcacatcttccgagatacatcatgcttactagaatagggtcctagttgacactagaactcatgcctcagtccttgtaactaccacataaagggcccaacacacaaggtcattacagtccccagttgtaagtcaactgactcacacacacaatcatcacatgcaacagatgcacgaggtcacacctcccggtctctaattaaagtaacacattccatagttataattgtttgggattcacactccccaggtctttcaatcataagaaaatagattgcatttcttataatagcaattaaaatcagcgtacaacacttagacaaaacaaatcaattgaacataacaatagttagtcaaaattaacaatttaacataacaaagtaaccatgtgttaaaaaccttaactttaggaaacagagaaggttcaagccttgtaaaaatgtagcaaacgaatttaccaacataaaattttatataaccttaaagaaaactttcatatatttacaacaagttataccaattcattagcaaaaatctaaaatatatatatatatatatataaattctacaagacagcaagataaagagcatttcaattttgacatagttcaaatatttgtaaatttatacccgttctcaaaaccaaattgacttctacttttttacagtttaaagcaaacataacactcttttcatcaaggttgaaattgtataaatattcattttgtttcattccaagtaaaattttctttccaacacctttttcagaccttacaaaatgtctttcctgcaacaactctgtttttctttgacctttagaaaatgaagatgaaatccataattttaatcatataaatggttgaaaataattttctctctagtttaataaaatgtaaccattgttttaagtcgacaaccagataaataaaaattaaagaaaaccacgcaatgctagacacaacttgaaaaacacgataatctccttgcatgtcatagatcaaaaagatctcatctcttaagggcttcaaaatgaaagttgctgaaaattttgtctagagtaaaccacgacaaattttatgaaaaaccaatgggtagattttattataagcccgaatctttgagactggtccagagaacaaagtcctccatccagtctctccctcatcatagccccaaatttcgaaaatcaaagcttgtttaaaaaatcctaagaaaaatttgatagagtctcctttatattaggatctcttccaaggaaaaaaaaaagaaaaaagaagagaagacatgtatgcaactgaaacattcaaaactttaccaaaaacaatttgagaaaaaccttaaaaacccatttttttttcaacatgcaatgcaatagaggtttactacaccatggttgtctccttccaaaggcaaccacgggatgagttcataaaaaaaactcccccttatattaatttggagaagaaatgaagatgagagtgcaagcttcctagccttgcaatagcaccaccacaagaaccacaaaatttgattttggtcttctccttctccttgttgctcacaattttggatgtatttatgggaggaaaaatggtttttcttcatgctttctcaaggtgctgaaatgaggtgagataagagagctttctagcctgcttaccaagttggaatgagtgaagtgttagtgggtgtgtgtggagtatggccgtcagataggggcgtagtgggaaggttgagtatgattttggttaaagatgaattggggggaagagttttttgctcagctccctctcctattggtggatagggttttggccatgatgaccttttggggtttcccttcttgccaccaccaccaccaatgaattttatgcaaaataatgaatttccatccatagaaaattctcaaagttctcaaacttttttctttaatgccacaaaaatttcaccatgttttgtatgccttccaatagttctagtagtccacaaacacttttcaatgatgaagttgagatgcaatatccataattttctacctaaattgggctaaaaaatatcacactagaggaaggaggaaagtattcttcaaaaaagaaatcacgagtttacttttcaattgaaaatgatacacatgtcattggtttgtgacttaaagtccaatggatccaattttcagtgatggtcaatcaagagactgtttttggttgatagttatagaaaattacaacaacttttgcaatgatctacaagatagaacattgaatcaagtgaaatcttgatggcaaaaaattaatgttggtgttcaaaagttcaagggtcattacaagctagttgttgatttgaagaaaaacggttacacgaagaatgatctcatgattcatgcatatgattttggaaggaagacaagggaagaaattttactttagagcagtcatggcgactgctaaaagataagcctaaatggttagtataatgcacaaaattttgaaaaaaaaatgacaaagctttatgcttctagggcttactcatcgtcatctaatctgaaaataccaattgaggttttagaaactaacacaccatgatgagttccccgcccaatgggacaaaaggcagccaagaggaagatcaagaagaaagaagctgcaatgtcttcaatgattatagacttgccaggcatgaaagttgcaattagataaaaaattgttgtcaacaaaagaatagtagagtttagtatgaaattatgatgaagaacacatataccatgtttgaagaacaacgcaagaaacacaaaatcacttgtattttgtgcaagtttagtaattagtcattatgttttaagttagttttaatcagtcaatatgttgtaacagtgttttaattagttttaaaatgtgaccttcaaagcaattattaatttttaattatgtaaatagccgccataaaagtagtcattacaaaactagttgttgtaaaagtagtcattgtgaaattagccattataaaagtagtcattggaagtgatgctatttaattgctaaattttgtttcaatcatgcacattttatacaaactctgcgaaattcttctttattttctagttccactcacccataaaatggattcaaacactaacttcgagagcctttggaaacaaattgttgataaaacacttgaagacaacactaaagaagcaatcaagaggtacatacgtgaggtgaaacaacaagaagagaatagaagttggccgagacaaacaaggctccatataaatcgcaattgtgaaggcgaacatagtcgcttgttgaataactacttctttgaaaactttgtacacacaaagaggcaattgcaacaaaggtttcgaatgcgaaaatagttgttccttcaaattgtaggtgctctcaataatcatgattcgtatttctaaatgagatcggatgcaactggtagaagggtttttcactgttgtagaagtgcacggcaacaattcatatattggcatacgaatcacctgtgcaccaatagtgtcgataagttcattagtatttttgagtgcactacaattcgatgcttagaagcttttgcaaagagtgtgaatgagatatttaggatgagcacttgagaatgccaaacaacaatgacatcaatcatctactacaaattggagaggaacatgggttcccaagtatgttgggtcttattgattgcatgcattgggaatggaaaaattgtctagttgcatggcaaggccaatatcatagaggtgatcatcgcaaactcacagtaatacttgaagttgtcgcacacaagacttatggatttggcatgcatattatggagttataagttcaaacaatgatattaatgtgttaaactaatcgcctgtgtctaatgatgttttgcaaggtcgagctcctcctctagtgcaatttacaattaatgaaaccccatataatatgggatactgtcttgtatatgacatctatcctgattcggccacttttgtaaagactatccccatgccacaaggagagaaaatacagttatttgcaaaatgtcaattaatgaaaccccatattatattgacatgcattatattgcacaacatgattgttgaagacaaacaaaatatatacatacaatgacaatgttgatgtcaattatgatcatgtagacaaagagatttcaaacgttgacgtatctcgtggtactcttccgactttgttacatacctacaaacaagacgttatatgcatacaagacgaattcatcaacaacttcaagtagacttcgtagagcatatttggacacgtttcgatgacaacaatggtgaaatttaatttttcttgttgaatgttaatgttttgtattatgttacttatgaatgttatgtattttttgtttgtttaactttaagttataaataaaaatatttaattatcaatttttttattttttaatattagttatttcataattaaaatatttataattaattacttaaatttaatttaaaaataattcataaaatatatttaagtaggattcatatgtgacacataaaaagtatctcaagattttaaattatgatatacagttagagcaaaaggaaaacatttaatttgatatacttgtgacactagtattcactaaaaaagtatttcaagatttcaatatacattacatccattattaaacatactttaacaattatcgataaaggtagttagaagttgttgtgatcacaatattatagtttttgaaatcacttgaattgcattttatttttaatgtgatctccaataactatattttcattggattatcttaattggcaacagtgaaaacacaatcattatcatgttacaactataatttaaaaccttacttttaactgttgcaaccagatttttgttaaaaaaaaaaaaaagagttacaaacagattctacatcctcctttttttcttccaagaccaaatatccaatcccatcctttaataaaaaaaattataagaagttgttttcaaaatctattccacaaagatttcgcagatagcacgttagccagtatctacctacgaacagtagagaatgttttcattttcttgtaattgccgtgtttctttagaaattgggcacttatagagtggaccagtttctctaaattattcatcggtctaaaatcaaactaagataggatgttcttttcaaagttaatattgtaaattttttaaatccatttcatataccatatattatcatattgctagattgatcctctccccttgatctcaagataattgatagtcctacctaaataaattatcgctcgtggattaatggtcaaataattggaagccatataaatacatttaagcaagaaacaacggaatcatagtttggaagtatataaatacattgaagcaagaaacaacggaattagtggatgatcgtagtataatacatggtctcttgtcagttgataactactactggcgcgttgtgcgtaattaaccaaagctttttttatataagaaattgtatgctggactctattttacgcatgcatctcactcattctaaattaatattagaaaaagtacattctctcctttaaaaaaaatgaagtgtaatatatacatatttatctcacaacgaaaatggatatacttttgaagagaaattgtctagcttttttgaaaataagaaataaaatgaattaaaggagaggacaaaatcgactatgattgactagtagactccaaaatttttattacaaaaataaaaatattttaattttcagtaaataaaaatgggacattagtagggtattcgtaatttggtttaatttgattttttatataaaagtcatccaaatcaaacttataaaacatatgttgtctagtttggtttgatttcatttaaaataaaatctgaatcaaaacaaaccaatattttgcggtttgtttcatttcttacgaaaatattatttcatttaaatttataatatactttcttattaatttccatcttttaaattaaattatattaaaaatttgttaataacaatctaagaaacttgttaatatgtcaaaccttctacaataaaaactgacaaatttacatccataatttaaacgaaacatatcttaaaaaagtcatccaatccgtctcggcatctgtcctactggctgttgaaggtgctggctgatgaaagacatccccagaatgcccccctttcgtgcctatctcacttgtttacagctcttatgggtcttttcactgctttcacatgatgcaatatctgggcctccatttccatccatttcaataggagcgttcgtggtttggtttggttctatttttcataaaaaattcatccgaaccaaacttataaaacatatgtgattcagtttggttagattttcatttaaaataaaatccaaacagggtttggttattcgaaccttgcttcaggctaaaaaaaatgatgcattttaattttacgagaatgaaaaacgtactaaaaagtatcgatgttaacaatggttatgcaaaaccgatatcggtgtcgtataataagcaataaaccaaaaaatgtaaaatatgcaaaaaccaacatcggttcttagcaaaaccgatgttctcatgtgcaatacaacatcgattttcctaaaaactgatgttgtgagtacacctgacaacatcggtttccctaaaaattgatgttgtagtgcgcaccacaacatcagtttttaggaaaatcgatgttgttttttgctattttttttaacatcctgtgtgtttttttaatattacccaaacctgcatattaaaaaatagaccaatcctagtagtttcatagtacaatttttttatattattattgaataattactataaattataaaaaatatttaaaaaaaaaacaataatgtcaatacataaaatcatctataatcaaatgtaattaaacataactctacaattgtgaaattccttaaacacctagtgtttcatttttaactttgagataacatcttggtataggggatcattgttaggttctagcttatctacaggtttcaccagtcccttagatccttgtttatcctacacagttaataaacataagttaatgacaatcaacacattatttgtaacaaatccttttttaataataacaaacacaacataaggaaatacatattctgaaaaaggttgtacaagatgtgttggccaagcaaggaaggtgttaagggcatgtctcactaattgaaccgcttgagtgggtatagggatgcgagcattaacatctcaaacttcctcaacaccgaccttcacttgttcattgcccaaagggacgttgtggaaagttgtcccaccttatgcatctaggtctcaaatagataaacttaagagtgatgctaaatattatgtgtgggatgatccttatttgtggatgttttgtagtgaccaagtgatccgcaggtgtgtgccagatcatgagttccagtccattcttcagttttgttatggcacacctatcggcagtcattttggtcctcagcggaccgctagtagggtattggaatgtaggttctattggcccacattgtttagagattctcatcactttagcaccacttatgagcagtgtcagagaacaggaggaactattacacataggcatgagatgcctcaatagcccattattttctatgagattttttatgcgtgaggtattgattttatgggtccatttcttgtttctcatgatttttcatatattttgcttgctgttgattatgtttctagatgggttaaagctaatgtcaccagaactagtgattctaaagctgttgtggattttgtaagatccaacaattttttgtaggagtggtgtgcctagagccattataagtgaccaagggagccatttctgtaacagatcattaacatccttgctccagaagtatggggttgtgcatagagttgctacaacttatcatccccaaaataatgggcaagcagaggtttttaatagagagatcaagcaagtgttgcagaaggtagtgcaacccaacaggaaggattggagcaagctacttgaagatgctttatgggctcacaggaccgcttaccgaacacctttggggatgtctccctatagggtggtttttggtaagtcatgtcaccttctggtggagattgagcaccgtgcttattgggcagtgaagagttgtaacatggcatttgatgaaacgggtatggaaaggaagcttcaattgcaagaacttgaagagatccacttagaagcctatgagaactccaaaatttacaaagagaagtgaagagatttcatgactctaggattcttagaaaagagtttcatattggccaaaaagtgatattgtttaacttttgcctcaagcttatttccggtaaacttcgatttagatgggatggaccttttgttataactaatgtttttccttatggtgcatttgagattaaaaatgaagttaccagcatggtctttaaagtgaatggtcaccaactcaagctatttcatgagagccctcaagtggaggacaagcttgtggcagacctctctttggtcttgccagttttatataatgtgtcttgaatgacatttggggagttgtcttttcccttcttttatttgttgtcgctttgtttgcatttcattgcatgctcacattgaggacaatgtgcatttcaagtgtggggtgaaggattacaaaatatgttctattttttgtttgttttctgtttctatctgtttttgttgttgtttctgttattgttttgttgtattagttttgtttcgttgttattctatttttacattcaaaaaattaaaaaaaaaaaagaatttaggcactttttcatgttttcataggatttctaacttgtataaattgtgagaaatgtacaattttttgttggatttagaggtttcatgtttgatgtgaatcattgttgcaatttttgaagtgataagtagacttgagaaatatattttaagatggatcatgtgtgatagaattatgccttgtgagtttttgaacctttgtggatgaatcacattatttcattcatgttctttcatgtgtgatttcacccttgtgctagattactctatgttttgccttacctcttttgacattccttgttgcacatgctttgattgagatgatttaggtcttctttcttttatccactagccaaataaacctatccttgcattgatatccactgtcaccctttttgagcctttaaccttttctttcttgtgtagctcattacaaactaaaaaaaatggaaaatcatgatatcctagctttagggagaaaaggggccttggaatttttttgggagtgggtttcaaacaagtgtggggtatttttagtttgttttgatttgggaagaaaagaaaagaaagagtttaaaaagcaaaagttcaaagaaaaaaatgtataaacaaagaaaaagaggtacaggcaaagaaaaaaaaaagaaaaattgcaataaaagtagttgtggcttatttttggatttttttttgcttacttgacttatcttccttgtataggacctagaggattctacaaaactccaaattgagcataagagtagtccttggaaagacatggaaaagagatacaattttgtcaaagataagtcgaggttaattctatcattttaagggtcattttaggcttggaattcagaacccttgcacttgaattttgggttgcgagttgggtttggattggtgtaattagcataattagttagattagatgggcctaatcatggcccatcctttcttgctgactgagtcactatatactagtgcaattaattagttaagaattacacttcattttagcacaaacagagtttgtagtttcttttagaagtttccaaaattaaaatttctctctttttctctcattgttgttcattattcttcagctttcttgatggaggtccattgcaagcgaaaggtctagaaggaaaacttgaagaacttcctttggttagctttagaggacctatgacaagagatagaactcaaggtcttcaagaccacatcaaagttaacttgaacaagcatgaagaagcacaccaactcaagaggaacaaggctggattttgtactctaaagttgaactaaatgccattatctccttttcaaattgttatggatttaattctttaactcctcttgatttactgccattacctaacacttcttctaatcatgatgttttgtctaaagcttcttatgttaagaaattgcatggacaagtgaaggcgcatgtggagagaaagatggaacaatatgcaaagcaagccaataagcacaagaaacaagtgatctttaaggaaggagatttggtttggcttcatttgaggaaggatgtatttcctcaagaaaggaaatctaagctccaacctagaggagatggaccttttaagattttggaaagaattaacaacaatgcatataaacttgaattgctaggtgagtatggtgtgagcaatacttttaatgtttgtgatctttctttgtgtgatgtaggtacaagtggggaagcaaacttgaggtcaagttcctttcaagaaggaggggatgatggaggtccattgcaagctaaaggtttagaaggaaaacttgaagaacttcctttggttagctttagaggacccatggcaggagctagaactcaagcccttcaagaccacatcagagctaacttggacaagcatgaagaagcacaccaactcaagaggaacaagggctggattttgtactctaaagttgaattaaattccatttaatttcagcacttgttagtagcaaaagtagtgacaataaaaaggatttttagtgcaattgtgtaaagaagtgcacatgcacttgtctgtaaattgtgtagcacctatgcaacttgaatgtctcatttcgatgcccgtcaaacatgacaacctcctcgtcccataactttgtcaagtctttaatcaagggattgagataaacatcaatatctttttcgggctttcttaggaccgatatcatcataaacaacattatgccttttcactttttgcacaaccaaggaggcaagttataaattattagcaaaacaggccacaaactatgctgagtgcttaaactgtcatagggattcattacatcactggaaagtccaagcctaagatttcttgcctctttgccaaaatccagatacaaatgactaatcttcttctactgggaggaaacaactggatggcggatcattccatcgtagtttctcccatctgcatgccatgtaaggtcttttgcgtcatcttcattaccagacagactcttaaactttggaatgatcaaaagataccataacaccttcactgggggtctttctttgtgctttcctctctgctacactcgtcattatccagcactttgtaccttgataccccacacctggggcatttatacatttcttcatacttatgtctatacagtatgcaatcattagggcatgcatgaattttttgatattccatacctgtaacgcctctctttaccctctcgtgcttggtttattttagataaaatattgtgttcgctttgtattagaaacaaattagttataaatttttttcatgaaaatttcttttctctttgcttgcaagttttgtgtaatttatttgtaacaaccgcgactttccctcaccacgattcatatacttatagttctttaatatagatgaaattactaaacagtccaaatacagttccaaagaattcatcaccaaatggattataacaccttagtacagacagcgcagcaccaaatacaaatcaaagtatagatcatcaaaaacaggaaatcatcacacaaacttcatcacatcttctcgtacatcgtccatatcactgttcccctgctcgcccaaataaattggggtcatcacaggtgtcaaccaccgacacaaataggggtaagtacatgataaacaaaatttaaatataaacagacataaatatacgtaaatggttaaataataataccgaggattttaatccgtttaccaaaaatttaattattatttcctcaacgcatgtattaaattatctattttcttcacacccacttgcaatgaaatgaaagaagatgcatgctcatcttattatatgatacatgactgagatctcagcttctcaacgtctcaacgtctcaatacttgtggccacagtcagataaccccaccctcaccttagtggaacgaacttatccatctagtcagggtagcccaggggcgcgtaggaatgtcacctccacctatgtgatcatcatggtggtgtggtcctccctgtctcaactaccccctagctcagacacctctgaacgtatggactcagtttagttatctgacaaacacctctttacgaggatcgtctcatcgtcttatcatctgcggattaacccccgctcgggtatatgcacatgaaatgacatgaataatttattttacatctcttaattgttctttccttattactttcatctcaaactcatatcatcacatggttcacttctcaaatcatcacagggtcatcacaatatcatcacagggtcatcacatcttagaatcatttctcatcacccatcacttttatcttatttttctttcttattatttatttaggatctcttaggtatcgcaaagtcttaaaaatccacataaccatcatcatcaaattttatttaaagtctttcacttataaccaaattaaaagtcatatactctatgattaaacataagcaataacataactgaaagaacatatcttattcatttatcacttcttaatcctagaatcacaacataatactcataccaatactcatatccattaaaccaagtcatactaagtttcacaaagcttcatcataccacaccacttacccttcattatactttggtttctaaaactaaacttttaactacatacttcaacattattatgtctactaatttgtgtctaaataatcataattttaacttaacaacaacaaaaggaataattaaaagattaacaacatcaaaataaattattaagagatttattagcaacaacaaaagaaataattaaaagatgatcatcaacaacaaaataaattattaaaagattaccaacaacaaataaatagttaagagattggttaaagaaatatttcaaaataactatcttatatgttatctataattcatgaaaccttttaaatcttaaccactgattattatgtaaagagttgttgctttaaatttaggtttgtaactatttaatttgagttctcatcataaataaaaaatctcatatttatagcatacctcttcattcttcccttcaattcatcaactcaaatcttcatcaaactcaaatctttattaacttaaacatttactgaaaatagagttcatatttaaacttaatttatcaagacttccccataccttaagtgttggctgaaattgaacaagctttgtcccctttacttctaattccacgtgaacttgcttggcttttgggatgtttttgcttataaaaatgatagccaaaggatggagatatgtacggttaaagctttggtatctaggattcaacacaaactaaaacaaaaaggcaagtggtgttcctttgggctgcatggttggtgccttatatctttggctcaacaaaacttaaataaaatcaaatggagagtgaaaggcagcacggtttcttctatatggtgctgacccaaaattgcttccattcccttatatagcatggtccactaattgccttattcctattggttgatcacttgaatcccttggtcaacaattgctgcacggttgtatggcttagtccaagcagatttttttccttgcattgatgagagattcctagcatttattagtgattctctttgtctccaataattggccacttgctttgttttttctttctttgaaaccagcccctcttggcttcattttcttgcctcatctcacgtaaactttccttaaggctgccaatgattaattttttttcctttctcttttctccaccgtagcaagctccctaagtgccaaataatgttttcttttactcccttggcccacctccttcaatgattgtacggtttgtagctcctttgggatgagtttgaattgatttttttttccttttatgctgacccaaattccattcctttacttcttttatatcaaatttccaaattatcaagctattgcacggtcatgtagcttgcaagagttcaaattgcttttttcttccttgcatttaaagaagattctctttgtctaaaaaaaatcttcctcttaaccgtagcaatctcttttggttccaataatatatttgcttttcttccttctcaccgtaggtagctccttttaatgccaaaaatattttcttttgctttataacttggtttctattgattttatttgatttgatttacacttggacttactaatataacctttgttgaccaactttgatttccaatcttttctcttttgagtcacacggtccatattgtttcaaagcccaatattactatactttcctttacttccatgaaatagcataaatcttgttttcttgttattcttaatttgcaaaatcactaaactatcttaatcactatagtcacaagagaattcctcaaattatgttcatcattctcctctaattttctagtgattagaatcaattgaattttatttcacaatatgtattaaattctaaagatcgtacgagctagtaaattttaattttctaatcgtcctacaatattacttccaatccatatacaataagtagaaaaattggggtgttacaatacccatcggacagagaatctttttcgcctcatagtaactttttggcaatgtgttttcctctggagcgtatcctacactaccttaagcagtgaaatgaagcttttgtcactccacccatatctggcattcatattaaccatacttaacattgttgacaacaacatcaatgacttctttcaccccaaatacaaaggcgtcttcgaatcactttccaatgtatcatacataagggcatgtgcttgatgaaaagacttttgtccaagatcacaaatcatatactctaatcgatctcccatttctacgtcaatcggttcagtttgagatcccctttgtatgtctgtcaattcaccataccatattcatgtcgtataattattcttaatttcatcacacagaagatgttcatgtatgtcatctagtacttgtcgtcttccattcaaacaatttatacaaggatataaatatttttcgtcctcattcggccgacttctttcagaggcaaattccaagaactattcaacatcttcctcgcacgcaaggctcatgcgacttgcattcatccaactttgatccatttaattaataactcagtgatactcacatttattcctgcataaaaacctcacttttttattaaaggtgtggccttatcccattcaagaagatgttgatctctaagtacacgacatgaaagcaaagtgatgaatttcaccataatcatgtacccgaagaataaagttaaatgcactataccaaaatttcattaaattttaaaaaaataaagttaacctatatgtatgaatctactataaaaaaatgattcttcccaaactgtccaaatggataatttaaaattcaatacaacgattaatccaaactgtttggaagaattgttgtattgaatctcaaacgggaaactaaggttcactcataatgaatatatcttgtatataaagcaatagtcattaatcacataaaacaagttataaaagcattcgtaacaaaagggaatttcaaaagagtacgaaagacattcgtacctgtgaagatgatcaccaaaaatctcaaacaatgaatgttgtgatggtgatgcaagcaggaaaatgaaaactgcctacaaattacaatcataaatacaataaagaaattttcaataaaaaataaatttgatgagaaagacaaattgatttagagaatggatagatagttaagtaaaaaacaaataatagaaactaaaatggaacatactttaaataaaaaacttaaactgagaattataaaagaaatacaaagtaatatgtgtattataaacagggtgataacatgagagcgtgtttattaataaatgagtgtgaaggtgaataaataagaataattaagatcatgtgtcggtgattttaattaccaattcctatggcctatcgtaagacactcagatcagagattagtttagcagggaattagttttacatacatatggcttttggggaatagctactatttctctaaatgcaaagcaatagatttcatgtctcactgacattgaaccagcgcctagtaagcttggaggattacaataattaactatggtcactgttagtaacgaagaaaatcatcccgcaagacaatctatataggctacaaatttttcatctagaaataataaatcaaacatggaagcatccttgatgttcacaagggtacaggggcggatctaggttgaaatgggccagagacaatgatggtggctggtggacaaaagaagacgaacaacaatggcagaaagaacagtgccaaggagaaaacaaaaagaaaacggagacaagcactgagaagaggaggagaaaagaagttgtttctcatatttgggcctaatttgcttttcgtacccaccttttttctttctgcagcctgcactatacggctttttggcgtcgccctatctggaggcagattttctaaatatagaatatcaatgtctttccaatcaaagcattctcacatcttcatcatcgtttaaaccatgttcctaaaataacaatatcacatattaagaataacatcactaatatcataaaccaatattcaacaaaatataagtatctttatttaaaaaaataatctaaaaagtcatatttattggtcaaatttaaacaatgtgaaatgaaacttataaatataggtcacaatcataattatttagaaagtcatgcatagtgttgtgttaaagaatgtgaacaagtgatatgcctgcatgtgtgatatatatatatatatatatatatatatatatatgtgattgatttctctaaatgtttgtggccaaataaaatatcttattattttggtttttaggggttgatatacatcatcatgataaaaaaaaacttttagttcaatagtccaacagtttccaatttcatcataaaaagaaatggtttaattaacaaattatttagaatatatatagaactttgattagtttacataaaaaaaaacaagaaaaagaactctgattagtttggtaactgttatttatccaatcttactgtatattgcttcatatatattgctttttcagtgattatgaagctactacccaatcttattctcccagctattacgtagtacgtacgtagatacccttgtaggggaggatttagaaaataaattaagggggggcactcaaacctttaagaaaatatttttatgtttgcatatttagtggtgggggttcaggggcagtgcccccaattttttttttttgaaaaaaagatttaaatcaacgttttatgtataaagttatgaattcgtttaaaattatattatatatgtatataactaaaattatttaattaagaaaattcatccatgactctatattgaaaaatccaaaataacaattgaatttgataacacaagtaaagggtattaataataaaaagactgtaaatagcaactacctaaattaaaactcaaaagctcatttcgaaaatgtaatatgaaagagcgctcacatttttttgcttcctctttcacttgaattaaaaaaaatacagctcgggctacctgtcctttggacctaaagcccgcttagaagtggattcgaaccactgacacaaggattttcagtcctttgctctaaccggctgagctacttgaaccagtttcctaaagtatatatgattgtttttacctattgacttgtgaaattcaaatacacagaaaatacaaacaaaagtaataggaagtaatattttaagtttcaactttcaagtgtataaattgttggtggttccttctatttcaagtgtcaataatcattctttcaattatattattttttaaaagaaaaataaaatatatttaattaaaagttataatcaacaaagagcgtaattagaaactatttgtattggcctttacctacagatgatggtaggtacaagagtaaatgactcttacctacaattagatattgtaggtataaattaatgccttttacctacacatttgaaattataaatgtttcctatagtgacactcaaatgtgactgtagataaaaatatattcataggtaaagcttatggtgacagactattaaatgtcactctatgtcccctcaaagttcacgccaaaatgtccattggacaaagtcttttatacatctacctatagattttggacttttagtgacagtttttgtctgtaagtataagtcatttttcttgtagtgttatgtgtattgtactcgatcactccaagtaatacaaaatgttttcaatctggctcaaatcatccattttggtcacgaaatttgtcaaagtaagtttcttttggcttcattatacaaatccatggatgatgttgttgatatttatgagaagtcataaagtcttcaaaattttgctggaccttgaaggagcttgatgtgtgtctaaacccattagacactaatttcccaaatctaccttgcaatgaaacccaatcttcaagccttttcaagaacacaagcttgccttcaattcttgtggaacatatggctggaaggaagcttcaaagtgcagcaataagctctccaataagtctaggaaaaatcgccacaatagcattgagaatccattgataagacccaagaagttcttgcatatgaacaagagaaaaactctctcaacaaatttcagatttgtattatgacattaaaagttgttacatttagtttttgggcaacttatatagccacaaaaataacaaactaaatggaaggaaaattacaatgaaatgaagcttgtaatgcaatctaaagaagcctaatgcaagctaaatgaagcttgaggtgcaagcttctcctaagtgactcttggctgaaccaacatgcctaaggtgcagtattttaagcctctaagtgcagccaacaagcttacataagtgccacacaatttacacacaagtgcacctacatttctttacacaatttcactaaaaagcctttttattcccactacttttgctactaacaagtgctggaattaaattgaacatgagacatcaaaatccagctcttgttatttttgagttagtgtgcttcttcatgcttgtccaagttaggtttgatgtggtcttgaagggcttgagttctagctcttgccaagggtcctctaaagctcatcaaaggaagttcttcaagttctccttctagatctttagcttgcaatggacctccaccatcccctcattcttgaaaggaacttgacctcaagtttacttcctcacttgtacctacatcacacaaagaaagatcacaaacattaaaagtattattactcacaccatacttacttggcaactcaagtttatatgcattgttgttgatcatctctaaaatcataaaaggtccatctcctctaggttggagcttggattttctttcttgacgaaatctatccttcctcaaatgaagccaaaccaaatctccttcattaaagatcacttgctttttgtgcttattggcatgcttagcatattgttccatctttctctccacatgtgctttcacttgttcatgcattttcctaacataagaagctttagacaaagcatcatgattaatcatagaagaagtgttaggtaatgacagtaaatcaaaaagagttaaaggataaaagccataaacaatttgaaaaggagataaggaagtaatcttgtgaaccactctattataagcaaactcaatgtgaggtagacattcttcccatgtcctcaaattacccttgatgtagcatctaaggagttgacccaatgtcctattcaccacctcagtttggtcatccgtttgtgggtgacaagttgatgaaaacaagagctttgtgtcaagcttaccctgtaatgttttccaaaagtggttaaggaactttgtgtctctatcactcacaatgcttctaggcaatccatgaagtctcaccacttccttgaagaagagattggctacttcacaagcatcatcactcttatgacaaggaatgaagggtgtcatctttgagaacctatcaacaacaacaaatatagaatcctttcccctcttggatcttggaagattaaacacaaaatccatagaaatatcaacccagggggagttaggaatagacaaaggtgtatataaaccacgaggcattaatctagatgtagctttatgacaagtaatacattgagatacaagcttatgcacatcatgcctcatttttggccaaaagaaatattcatgtaaaatagccaaagttttacccacaccaaagtgccccattaaattgttttcataagcttctctaatgaagagttctcttaaagagcttttagaaacacatagtctcttttccttgaacaagaaaccatcatgtccaaaatatccttgatgagctcccttcttacacaaagcaaaaatacaagagaagtcatgatcacttgaatataattcatttatgcgattaaaaccaagcaacttagtttcaagcatggaaatcaaacaatgcctccttgataaggcatccaccactacattcaactttcctagcttgtgtttaataacataaaaaaattgctcaatgaattcaacccattagcatgtctcttgttgagtttgccttgacttttcaaatatttaagagactcatgatcattatgaatcacaaattccttaggtaaaagataatgttgtcaagtttgcaatactctaacaagtgcatacaactctttatcataagtggaatagttcaaacatgcaccttttaatttctcaataaaataagcaataggatgtttatcttgaatcaacccccccccaatgcctacatttgatgcatcacattccaattcaaaggaagcattaaaattgggcaatgcaagaataggtgcatgggacaacttatccttcaatgtttggaaagcaatttcatgttcttgcttccaagaaaagctcacggttttatttatcagttcattcaaagaagaagcaatggtactaaagtccttgaaaaatatcctataaaagtttgctaaactatgaaagcttctatcatccttcacactctttggagttggccactccatgatggctttcactttttcttgatccacttggactccttaagcacctattacaaaacctagaaacacaacttgagaagtgcaaaaagaacatttatcaattgctccatacaaggtttccttcgtaagaacctccaagacacttttaacatgcatcaaatgatcatttaaattggcactataaacaagaatgtcatcaaaatagactaccacaaacttgcctataaagtgtctaagcacatgattcataagcctcataaaggtactaggtgcattagtcaaaccaaaaggcataactaaccattcataaagtcaaaatttagttttgaaagtcgttttccattcatcccattccctcatccttatttgataataaccactcttaaaatcaattttagagaatagtagcaccatgcaattcatctcaaagatcatcaagtttagggatggaatgtctataccttatggtgatgttgtttattgccctacaatacgtgcacattctccatgttatctccttcttaggtacaagaataataggtatagcacaaggctcatgctctcacggatccaccctttgtcaagtagtatttccacttgtgtttgtatctcttttgcttccatgggtgaagtcttatatgctggtctattagggagtgaacaacctggaatcaaatcaatttggtgctctgtgcctcttaaaggaagtaagccattaggaatgtcctttggaaaaacatcttcatattcctccaaaagagattgcatagctttgggcaatttttctccttctttttcaacatgtaaacaaagagagttaggaaccatataataaagaggttatttgtctaataacactctcttgatttccttttcactcaagaacaaaatctctttaatctcatgaatttttttgctctcattttctttctcttttattttcttctccctagtttttctctttggtagcgcactattcttgctcttttttgtgcaatattttttcaagtgcagtatttttttcatctcttgaattctcttttctttcatcctcacttgatcttcacacatttgtctaggagtcaaaggcctcaaaataattttcttgtctaagtgctcaaattcaaaagtgttcttcatgccattgtgtatgacttttctatcatattgtcaaggccttccaagaagaatatgtctagcctccataggtacgatatcacaaagataattatcattataagaattaatggaaaaaggaatgagcacttgagaatttaccaccatttcttcactctcactaagccattggagcttgtatgaccttggatgctttgtggttcgcaagtgtaatttctcaacaagccttgtgctagccacattggtgcagctgcctccatcaattataagtaagcataccttgtcttcaacaaaacgccttgtatgaaaaatattttctctttgagtctcctctttttctaagcaaaaattgctcaacattctccttaccatcaagagatcaccttcttcggcctccacaagtgtaagttcttcttcttcttcacttgaagactcactctttatgcctccatccttaagcaaaatcattgttcttttgttgggacattgggaagcaatgtgacccttaccaaggcacttaaaacacttgatattgctcgatcttgttggagttggatccataatttttttgcttgagcctccaccttttcttctttatttttcacttgagaaacctccctcctaggcttgtcttttcagttggaagttgcaaccccattggtcttggaagcttttctcttttttagttgttgctccaccttttaagctttgtggactagctcctctattgttgcataagaatgtagctccatcacatcttgaatttctctattcaagccatgaaggaacctagacatggttgcttcttggccctccacaatttcagccctcatcatcatcaattccatctccttatagtagtcatcaacactcttgtagccttggaatagtctttggagcttgttgtggacttctcttgcataataagtgagaacaaatatttctctcaagcacaccttcaagttattccagccatttattatttgtctcctcaacctccctatatccatttgaatttggttccaccacaccaaaacatagccaccaaattctaagttgctagaatcactttctttttttcatcaaattgttgacatgagaaaatttgttttactttcatctcccactcaaagtaaacttcgggatgtgccaaggaactttagaatttttattttcactccatttaatccttcattcctcccttttctctcttctctcctaaacctccaatcttcctcatctctattgtgcctcctaggattatgtctcctattattttctcttctattattatattctctccaatcttccctctcattcccctcatcttcataatttcctccatgagaggatgcatactcactcaccctcctattgccatgagcctctccatccacacttccaatgggattactccttctttgggtctccctttgtaactcctcaaatcttgcatccattttggtatgtaaatgttccatttgttttgtaatgcccttcatcaacctagaggtcttaggtgacaaagcctcttctcctcttgagctcatcattcaaaagaaatgattagcaaaaacacaagtatataaggaaattttcactactctctaagtgtttgctactcactcgtgtttgcacactttatctaggttctttctttaatgttctctcttgccttttcccactcttgttcctctctatagtttttaagcaaaaacttccaatccaatcaagcttctttactctagtgaaacaggaaacaattctaggttagactcaagagtccaagaacaagaaaactttaagacaaaaccttggattttttaagagacaagcaattgttatttcaccaagtttgcttgttatacaagttcacttaattttgtggttcaaaggaaatttgaacttgtagtttttgtaactttgatttgcttctaaattctatttttatttgtattttttcagccaccaattcaataatgtctttggctgtaaataattgtttttcttttgccttttcttgtttctctcacaaaatttttgtaaacttttgtttttcttttgtacaagttcaagaattcttaaagaaacgtaatgaatcacaaaaaaactatgtataacaattgtaaaatttgcttctaacaactcaattcagtttaggcatgagattagaatcaaaacaagtggttatacaacacacaaaaacacaagttgacaagaatcaaaactagaaaattagaaaaatatcaaaaacaaatgaagaacatgaagacatgaatttcacaagaacttgaagctaaacacaaggttaagtggcaggacacacaacagatcccacaccaccaagattttcatgatagcttcaagaaaactagaaatagaagaagatttatggttttcagatagggacagatttttacctttggggaagttcttggaactgaacatgaagaagaatctcacaaggattaggctctaaataccacatgatgtgtgtctaaacccattggatattaatttcctaaatctaccttgcaatgaaactcaatcttctagcctttttcaagaacacaagcttgccttcaattcttgtggaaaatatggctggaaggaagctgcaaagtgcagcaatggaagatggagaaaggttagggatgaagatggaagacaccatggagaagctctccaataagtctaggaagaatcaccacaacaacattgagaatccatagataagaccaaagaagttcttgcacaagagaaaaactctcaacaaatttcagatttgtattgtgacatcaaaagtttacattcagtttttgggcaacttatatagccacaaaaataacaaactacatgcaaggaaaattacaatgaaatgaagcttgtaatgcaatctaaagaagcataatgcaagctaaatgaagcttaaggtgcaagcttctcctaagtgactcttggctgaaccaacacgtctaaggtgcagtatttaaagcctctaagtacagccaacatgcttacataggtgttacacaatttacacacaagtgcatctacatatttttacacaattgcactaaaaagcctttttattcccactacttttgctactaacaagtgttgaaatttatggaattaaattaaatttgagacatcaaaatctagcccttgttattcttgagttagtgtgtttcttcatgcttgtctaagttagctttgatgtggtcttgaagggtttgagttctagctcttgttatgggtcctctaaagctcaccaaaggaagttcttcaagttttctttttaaatctttagcttgcaatggaccttcatcaaagcttgtctgacttatctgactcggaaacttactctaagaaacttcgaagagtatattcgaacatttctgactttcacaacttttcctgaagatttggccccttttgcaagacccactatattcagacctagttggctgaaggttcgatttccatgtgaaactctaggtgctcaagctgaaatgatcgagacttggactgctttcctctttggagatatcatcttcacggttactcaagcatgcgagttgttgattttttaccaaaagatagaaaatttataaattataatgttgtttcacatttgatacctaaacatgcattttagtactaattgccttataattaagattgttacaatattcaaataatcatatttttttttcaagttgaaacacacgaaagtcgctatatagttcgaataaaaataatccacttccttgacatttcgattttaagtaccaaccacgaataaaaatacttcattggttggttaggcatcattatgagaaattaacatgtaagttttagtatctgttgaaacttattgccaagtttccacaatcaataggtttcttcaaaaacaaaatcgaaaaagtgagtaagcaacttaaaaggtaattagtgctcctattttttccttgaaaaaatttacttccaaaaaaaacttttatatatatatatatatatatatatatatatatgcacatcctatatattagtaaaattatgatatataaataatcagtgacggatttaaggggtttcagccccccaaaagaaagctttaataataataataataataataataataaactagttatagtaattaaaaatactaattaataaatctaataatatttgttaccattaattataatctaacccaaatagatatgtataccaattaataggtatgataatattgattttttatgactttttatcacttgttattagcttgtctaattatgttttctgtattattataagtttcatttatatatatataattattaaaattaattattattaagattatattatatataattgttataaaatttgatgacttttgttgttattatatttaatgagttagttcttttttttgacagggaaattgaaactattgtatatttaaatattattgtgtttgagaaaccaaaaagcctttcaaaacttgaaataaaaaattattatgaattataaatacacatgtttccttattgtatcatttgaataaaaaataattttaattttatatgtaaaactaataaatatatttataaaagtcattgtttattaaatatttatttgttaggagttaaatattaaagtaattaaagtgaaaaaaaaaatcagcctcctttaatgattttatggatgcgtccttgtaaataatttacatcctataaataaactttgtaaatatttaaattaaaaagaactaaataataatttctttttcagtaattgactttgacccgcactatcaatcccaaaatgtctttaatgcaaaaagctaaggccttcattcatttcaaacatattgtctagtgaaagcattggatggtctgatattttgtcttcacatttgatcatcctagttcaactttttaaatcagggcttgggtagttagccaagagatatgcctacaaatcatcaggaacataaaaaaaaaaatatatatatatatatatatatatatatatctgcgtggacctacgcaagctttttcttaaatgatgtaataatcctttggcaattatttcgaacaaatcattcataacatgtggcttaagtttgattttttttacttggataaatcaatttaaacagagctaattaactagcatcacatctttgaaaagaacgtgaactcgaacaaagttcaaagctagctactgactctccatttgtagtctcaaatcaatgatcaatttcaatgctatagggatcacgtttagtgaattattaattatgactaggacatgttaagaatattaattaagaagttggtcatttttcgttcttcgaatatatacttgtgttaaaatttgtctttttgcatggcatactatatgccggtaacgtttactaaaagtagccctatcaaaggcgcactgcaacgttgcattataataaagttctagttgcacctaaatttgtctttgtattgtttttattaatcgataataagttgtatttaattaagataacgaccctaccgacatcatttctacatattgcatgtttcctccctttttattagacggtaagatatactacataccatatggacagtgatcaatattttaacgcgaaaattgaaacaaagatattcctgcaagataacattatatttgtgtataaactatcactacaaataattaaaaaaaaatgtttgttttccaatccacgttcaaaaaaccaaaaaaaagttaaattagggtattctcttatcgagagtactaagattcattttgtgcgtgcattgatattaattacaatcgattttagctcccaaaatcacaataaaaagttaaaaaatcagaaatagcaaagagttggtttgccggcaccatgaaaaaaataagcgaaatgtgatcaccacataactcaaccaaacgcacacttaaataattaacttctcaaatcaagtatttttttcatgcacatagattcaaagatcaaacttgtaagcatgtacttaaaagaaaaaagttaatttttgaatcatatcacactattttggtaacaaaaaaaactatttaatcacaaataatgaataaaattattattataattacaaagatagaataaattaagaggcgggaattcagtctggatcttccagtgtcatttacgacaaaaatgtcccatatatctcactaatttttattttttttaattttttttcttgcagagggataataccttagtgatcacctctcaatgatctgttataactcagattgatttttaaatcttcaatagtcttgaacgtgataataattaatggatacaactctccccccaaactagaaataagagttttaagaaacatattatacacgcaaagaacaattggacagtttaagcatcatcttggtgccaaaacaggacaatgagtactatggttttaataaatagagatcgagctatttgattgtgaaggataactatatataatgtatgaagcagatacatgatttcttttatcatgtgtaataccactactacagcgctaccttttaaagtcggttcttttcaccttttaaagtcggttttgtaaccgaccttgttttgggcgtggtagtatataaaagcctacaatgtttgtttttttaaaacccaactttgaaattttttttatttttttttattttttttaaaattagcgtattctaagtcggttattttaaaaaaccgacttagaaagtgaccttacaaagtcggttattacaaaacaccgacttagaaagcgacgatataaagtcagttattttaaaaaactgacttagaaagcgtacatacaaagtcggttattttaaataaccgacttagaaagtgatgatacaaagtcagttgtttgagataaccgacttagaaagggagatacaaagtcagttatttaaataaccgacttagaaagcgacatatacaaaaattcatttagctcaagcttctgttacaaatttcaacgaaaaaaataataaagctaacatttcaccaaataaaacaaacatagcaccatacaggcattttaatattgtagttactattacacataattatatatgatggatgcacatatacaatatccattacgatacctattttatacagcagtacaattatatattctaaaatatacaggatatcatacacaccttagcaggggatttgcttggggtttgctttctggcttgttttttgcctttctgtaacatagaaccaattttcaataaacaaacactaataaaatataataaaaaaccaaaataatttaaatagcatatttatataatgatttaggacttaatgatgctatacagtgcaaacatgattgaacttcttgatttagcatatttatataatccttacaaaataatcccattttttaaaatcatacggacaaagcatttcagaattacttatataaaaataatcaaatttattaacacgtacgaattaattcatgtataattattttaataattttaagtttgagtctttaaatatataattatgttaaatatttaaaataatattccatcggtccttcgtataagaaataaattagattttttttggttagtatttttttaaaaactaatgagtcatttcttttagttcagtaaataacaagcaaaatacattaaatttcagacttcatttttgagagtttaactttattttgtgttcaaattattttgaaaattcataagcataactaataaaaattatgataatattaaaaatatatgattttgagatgggaaaatatatatcctgtaccaataagtaataaataacaataattcaaaatttttgctgccagtgtgttcattgatgcttgattcaattccctacaatgaaaaaaagatttagaaaagtttcacaatttactgacagtgataatatgtaagaattagcttgctataataatttcagcttgattatgtatataatgatcctaaaatctaacttgagcttatttatttagcaaaataaagttgaaactaagatgccaaactcaaatagttcataaataaatgagtcattcacatggtacttgtcatttcaaaggtgaaagattctgatccatagcgttgatgaaaagaacagttcaatgctttattaaaaatcagaacaagaggataagccatctaaatgtatatcaaagacaggccataataagggaaagtcatatgataaaagggaaagaaggtaaatcactaaatcccatctcactgaaaagcatttttacctgttgagtcatagcctgcactggcatgacagggagagcactaaactgttgcatctttaaaaagaaagaaacaagaataaagtgaacttcataaaaatcacactaaataaccattgctggaaaaaaagaaacaacaaatacctgatttgtagccaatggaaacatatttggaaaaattccaggaattgtaggatttgccccagtgatctgacctgcaaacgaaggaaagttgcatctcagaacaaactcactactttcactttttacaatcctagtacataagaatgaaatggatccttttgctccaataggcacgagcttaattcaaccttgttgcatatattgtattcaaaattaaattcaagataaaccaattcaaaacagtttgcttatgcccacataggaaagcaataactgtaaagattaaatgcacattggatacacctgtgatacaacataaatttaccatttgtcaaactgatacacaagttttagatgcaaaaaaagaacgcaatagagaagagtacaagcaaaaagattttcttcttgaaaaacaaaattacaatataaactcttcaagaaattcactcattgacaaacattgcagccatataattcttatttacagaccagcaacatgaagagtacctgttcaccagcactaatgaacttcaaagtggcctcttcaaatgataaaatataattgatctgcaaatcatattcctgtcagatttgtttttcttttggattatcaaaacattatgatttgggcaattttcagtataattgggccatgtctgttatttgttcctctttgatatttgcgtcatttaattcgctcccaaacaacagatctttcacttcagaagctaacaaacccttgccctcacgttgactaatttcatgatacaacctgcttgttcagttgtagcctgtgcactttagactattgtggcatatgtcaaatactgagaaatggcttctccaccaacaaggaattcattggcagaaaaaataaatggtcattcttcagatgctgaggccaattcaaactctgcacaacactttagactagccagttggagttgcattatttagctgttgcaaccaagaagcaatcatatattaaatatgttttaaaattttattcctaatttaagctaatttagcccgttaggccattggtctggtatatggccagactaggtaaaaataatttcagcttggtatttgatgagattgatatttgatgcttagagtgttatagcatgtttgtatttccattcggggtcagattaaaccaaaagcataatacaacaccgatagcactattgttagcaagccaagaacaagtgtacctgtgctgactgctctggacttgttgagaccattgcactcatagtcccgaggttcactagaaagccccgtgtagcatacataagcacagtaaagagaaatcacagcaataggcaacaagctcccattcacctgtttttgcacaccaattattatttattttttcaacaataaaactaaattaatacacaggtccacatggacaaaaccaagtaccacagtttctttacagacgtatcaaatataattcccaaggcaccaaataaaattgagaaatagaagggcattattcaaagaaatttgttgaccccatttctacttttggtctactagttatgctaataaacaattcttaggtggtacaatgtactccaataaataaatatgttaacaaggtattacctgcaagtaatatccctgaccaaaactgattatatctggtattttccaattttacgtaaatagcataccaaaaatccaaagaatttcatttgaaagggaaaaagagggaaaagaagttgagttttaaccttgtaaccattcctacaaatgttgctaggaaggaggcaggtatgagagctactctgggttaattagtttgatacacatcaagatagtaagcacaaaaccacagaaaatctaaatatgacgtgagcccgtaaaagagaaagatatgtggcattcattaaaagaattatctttcggatgatgtttctttcatgatatttcctcttcaacattaagttacatcttccactttttaccactgcatcattgttatatgtagatttttttaattgtcatttaacaactcatccagaaaattaataattttcctttactaagagaaatcatatgtcccactaccaaacttaagtttgagatatgactaccagcaaaccggaagaaagccacaagcatcttctgcattgtcaaggaagccaccaaacggctacaggattttaggactttcttaagcatacaaaacaatatattattggaagttgtggagccctcagatgttctctcatcacctagcaattcatattgcacaagagcattgaatataatgagtttcaattaattaaaagctttatttagtctttacctaaggatgtaaggcaataattgcaaacacaaaagcaagaatcatggtcatgacaaggaagaagatattggctcagacctcagtttgaatttagcatcaaggctggatagttattaattaatttatgacaatcttatatattagatctattatctaatgtttaactataaatttgtaatgcgcatgaaatttttcaatctctagggagtccagcataatgggaaaggaaaattacattattgagatgtcatcattgtcaatagaaagcttgtatggtataaatgaaggagagggcaaggtaaccttatttctacgagagtacacttagaatgcaaacctgaaggaaagggcaaggtaaccttagatactgcattcaactgaagttcctcagtttccctgttcttgacaggatgtatttcgatctgctaccacattggcgaggaccaaggccactgctaccaaagtcactcttactcgaagaggatcgataaccaccaccattaacaccttccatctccttaatatccttctgcctcaccctaaccctattccttgacccacccctcaaaccatcaccgccaccattcctaacttcgactcgcactctctgaactcgttttcgcggtaaccgccatgtctgccagccgccatatatttctctatatacctaagtttgtgaattacaagggaaaaccctaatcctccctttgaaacaatttttttgtattttttgtttaataaagccctaaacccaaaacaaaacgaatccccgagaattaaaaattgaaaaacgcgcgagagatctgacggagattggagatgaaagaacaagataaaatcgagaaaatacaaagggggaataaaataggaatttaaagaggggattagaaacgaaaccccaaaaaattaggatcaggcgaagaagagatagattgataaggcttaccgacgaatgatgaaggaaattggatattaaaagggagagaacgagggaggcaacgcagttaagcgaagagatgtgatgcggcggagaatgttttatttaaaaaaaaatcaaagtcggtttttatcaaaaccgactttgaatcatagtaaactacgacggtcataatataaaccgacgtcgttcttgtattaatgatgaaaaaattacagaattgccaccgcttatactacaacgacgggttttgaacaaccgacctcgattgcctatcgtagaatatgccttttgtagtagtgtacaaggagaaaaaaataattgatgtattcattttaaataacaagtagcaaacaaatacaactagtgatatatttaagtaattactcactcggtcccaaactaatagtcattttactttattttatatagatcatcaagaaaaagtaataaatagataaaatagcataataattttacattatcattaattcattttcagatttggtaatccatcataaatatataagagatgtaagtagaaaaaagtaattaatgttacattcaaaagacaaaaatgacaaatgtattaggacaaaaatattcatatacaataattataataaaattataatgaaacagaaaaagtaaaagttaatttaaatattatagactttcaagattcgtcaactttaataggcttctattttactttttattactgatatttttgtcgattttgattaagtattatcatcaccctaattatattttattatttaaatattgtaagttttctgaaatgaactattcaacatatatcatttgtattttacttatataaactattaaaaacaaatatgtacacatgaagtgaatttaaattaaagttaaacagaagaagcatgatatttaagaaaggcatgaaaacaagacgggtaagtaaggaggcctgaagggacaaaatataaaaaaaggagggaggagaaagagagaaacacatgaaaatagtgaccgagagagggatatgtcatgataatcgtgaacatgaaaagtgtaacattccaagttttaagtactacaaatatatcataagaattttttttattaaggtcttgttaattatattaattgtaatgtgttgttattatagttattatcagttatgtcttatgtgagtgcatgtgtatctatacatgtgcacttgttgtacattgtatcctatgttattattattgtcattattatattatattatgttaagtgttattattatataattacgtaagtgttgtagttattatattgatgttaggagagtgttagattaagttcttataattataacgattgaaaactgttcaagtttagtgatagttttattatgaagatcctagaaagattacatcatatcttgagttatgcttgttaaaaatgatacaattcatcctacatcttagaaatcaaaatcaacttccatcttagagaaaatcagctctgaaattgatcataaaaacacttaaagtcccacattgtgaaaaataatctcatgaatctctttcttcccttatatatagaagagaccaacaagccttaggagcaccaaataatagagaggacatagcgttaagcatggagtccctcatagttaatatttttatcttccccttagagtttttaaacttcgggcatatagttagcttgtgttcgtgttttaaattgcactcatattttttattaagatttgtgaggatcgtggtggacaacgccaccaagttcgttcaggttagtcagagtttgtctctatactttcctagtgagtgcttcccctatctttcctaagttattgtcttctttagttattagtgtatgcttttacttaggcctatcaaagtgagcccaaacccagtgaatcaaccggcttaccatgggtctgaactaggctcaaaaagcaagagttcataataatggtgaaaactcaacccacctcacttagcctatgggtttgacggattagagtcggattgacccacttaacccactaaaaatataatattattatttactattttttatagtaagattattatttacttaaggatcaggataactacaatttcattttggcattttgaaatttgaatgatggcatttagaattaaatgttctacttctttagtatttagtaatttcaattatgtatgttggcttgacaatttgatatttttaaattttaagactttaatattgttgaactatgactaatatttggatgattgaattgtattttaaaactatggattaagacaggcatcataaatgtgatatgaggttcaatagaaccacttgtacttgaatgttcaagacaggcatcataaatgtgcattgtttttaagttgggggatgtggttaagcttaatcggggagggcatgaatgagttgaagaatgactctgtccttcgaatgtatctagttttgaatctctgtgtggctcatgttgatcccatgggttggagtatcttgcaagattgggtaacccctgacgccctgccggtagtctcgtctcggtgaaagtgtagtaatgtgatcgtgtgtgtttgttactacatggccttttgagtttctttcacaaaataattttctagtaccacatgcatatgaaaaagagaaaagaacattgcattttattgcatagtgcattattgtgagttggtctaacttgtgtgattaatgatgtggattgcgtgaatgccttgggttgctattgtgttgtgtgaatcgtttcatcctaagttatgatattttatgtgaaactattgtgatgacttggaatgaatgagataagactctttaatggcatagacaaagatatatctaaaatgacactatgtcagcataggctagaatgtatattgattttgagcatagactggagcaaggttagttttaagagtaaagctctgataagtgtcatattttagttattttttataatgttatctgttttattttggtaattttcttataaacttcccttagttctagttgtgttatattttgtacatttataaatgttgatgtttaaatatggaagattcatccatgcatttcgtatgttttgatggttatttgtttgattcagaaaccaagccaagatgaagggcaaaatgatcatttttaagaatttcatagtgccactcgcccaggctagcaatcaactcgcctaggttagtgagattacttcaacttgaaaaaaaaaactcgtttgggcgagttggtctggcacttcttgcaatgtttcatttaaaagacatgcaaatgggagaagcaaaggaactagaggtagaaaccagagaagaaaaatgcaaagcaaggagagaaaagagagaaaaatggagttgatatggtagagaagtgaccgtggattgcttccttcatcatgtcttctgttgatcttgtgctctacacaatgatcggctagtttctccaaaagattggatgcaatcttcatacccttaagtatctcttttgatattatatatatatatatatatgaatattttctactcattattggtgatttcattttatttgtaatgtttgattctatttggtcactagtttaattctaagttttacagaaaagtactcttagaatttgaactggatgaatttactttttgttactaggaattaagcataacgttttgattgcaaataacatgagattatgattgtaatactgagatgtttatttcatatgggaagaatctatatttggtaaatattcttaggattctcgaatgcgagggatcgattcagggtgatttaatgtgtgcataagtatgttagaaaatgattcatatatattaatattatttggatactgaggatatgagcgatgaaatccaatcctacgattctcttgaattaattaaattaattttacttatttttgtaatttttcgtatttatgacacactaattctattattttccttattttcattaaaccatgatattttgattaaattttttgtacaaaactattgacttgtttacttttatctaaaaaactaagtaactcaggtctctgtggagagaatctcttttataaaatctataacatgcgatgacattggtatgcttgccaatagagtaacaagtttctggtgttgttgtcagggacttgagtccttcactcagttctttcatatttaatttttcatttgaataggacattttccttactttacttatttattttattttgattttgtataaattgtctcttgttatattttatttttgctaacatcggttataataacccttgggttaaaaaaaaaatctcaagctagtagcgtgggaactggcgttggtagcgtgaaatggcagctgaaggccatttttcactggaatctggcgccagtagcgctagagtggcgccagatgtattaggaactggcgctagtagcgccagagtggcactggtagcgccagaattgcttcaggaagccattttctctggaatgtggcgccggtagcgccagatgcactgggaactggcgccggtagtgccagtgtgacgccaccagcgggggaacacgggcagacccactataaaagggtcattttacgagttttgggccaaaatcctttgcttcttcttcctctggccgtgcacctccattgctgagaacccaagcttcttaaaccttcatttattcatcaaaacaccatccaacaaacataaaacttgtgggaaaccacctagagagctagaatccttcatcacttttccctaaaaagcctcaaattgagaaatccctttctttagggaatttcgaaaaactcgagttcgacaaggaaaggaggcgattcacggacacccaagcttggggaagtagttctttagccttccttgtcatcttagaggtaagaaactcgagttttaccgtttaatttgtgagattgattttgggatgaatagtgacccttttgagctagagctgaaattaaccttaggtcctttagaaaagtatgtttagggagttgttgtgatgaaggatcagctttcaaatgttagtttcatggactttggtttttggctctgagaaatgcatgtgttggtattttgttggttaattgatgattatagaccatgcatgagccttgataattgctctatatgtgcctgagaggctatatgaacggctacattgtgtgaaagaaaccgttcaaaccaccttgtggattcttgagtatttggcctgtatagagctttgagttctttgctttggcttataccgagtcttgtggagactctagagcctgagctagttaaatgaaccaagattttaccatgactgcaattttagagagatgcgagagcgaaagtctattcaaaatagaaattatatgaattttttgaaatgaaagaaagagacccggtatactgaaatagaaataaataagtgttccaaaggaaccttctcttctaccgaagattggcctttgataaatgatcgggccattttttctatttaatatttaatatgattattctctttattatctttcttttattatacaaaataaaatgaccactaagggtccatgtgttgtctagtgatttggctgactttgataaccttaagatagatgactagaggttttgcaaaggaaggatgttcctttcatctataacggctgaggaccgttgttgcttacttatgccatgtattgtttgtttggtgattgattttatgcttgtatgccttgtatagggcgtgacaccgagggtgtcagtggtgtagaccaccgttcagggactgaaccgcagagcacggcttttccaggtaagttcttggtttcttggggatgttttccattgctgtgttccaccatgctccgagggagtgatggttgcattcatgatgcatacattgaaatggttattgctttctcataatgatatgtatgcatgattctatgccttgtatgtatggatacctgttgattagatcttctagccagttagatagatatggacctcactaggagaagagcgcacctcctagtttggtttgctcacgtaaagggtgatgatgatcccttaagaccaagagataggtggtcccatcgcagttgaagcctaatctcggaggtgccatatacgtgcgtccatgtgtaaggggtagctccggatgtgatggcacgggtgtgagttccagtctcacactgaggacagagagtcttgatgctgatgatgatgcatcgtggctgcgtagttccgtagttatacattagagctagatgattggctgtatattgttatgagggtcgggaggccagtatttgtgatgtctttgatgttgtgtgtcatgaaagtgagccagggtggaggagatgcctccaaggaccctgagcttactaagatgtatatctcaccccgtgtggggattatgttttgcaggtgactctgataccagaggtgatggttcccagggcagaaggccctagtagggacagttgtgcagctacttgtgagctgggaggctcgttttgtatattttgttataccttgtacccttgtagagggaagatatgtgtgtgtgcacatattgtgtttaagttatgatttgcatatggactgtatattttgtatgccctcgtgtgaggaagtgatcttggagatcagagcactcggtgcttattcttttgtacagacactgtgagtgttagctaatgtgtatatatatatatatatgtactttgttacctcctattatatctgtagagatattggttatgcatctgccgtggttttatttatgttgttttggatcatgaggctggattatgtttataatgagcacttaacgcgaaccatacataatgaatcaagaaatattgttttattatcgcttccgcggctttttaattaaagtaattatgtgcttatctgattaaataatatgttaatacatcggatgcatatggggtgttacattttatggtatcagagcagtttcttgataaaagcattatgtatagtgattgtgtgttgctcttgactgttgtttgagtttgacatgactattgcatgtgtggacactaattgtgggcctgatcaactcattgtttggtgtacatgtgtagtgtcatgacgagatccaggaacaacagtggggcgacaaatgcccaacctgatccagtggtggctgcattggcagccatgcagcatgagttggctgctaataggccgatgcaggaggctatgcagcgtgaaatggctacaaaccgtgagatatgaggccttgatgaaggctaatcaggagatgcttgaggaggagagatgacagagtatcctctacacctccgacgcatgagggcgagggaagtcgccatcaggttgggggtagccacttgagaggggaccaggtgtcccatactgaggctgctgatgatgatgttgcagcccgagggaagatgcttatcacttttcgtaagcatgaccctctagttttccttggcggttatgatcctgttgctgtagctagatgactgcaggccttagagaagatattcacagtgatggagtgtcctgaccatcagatacttctctatgccacctatttgcttcaaggagatgctcatgagtggtggaccactacatctcagttgttgagaggccggggagatgttatcagctggcaaacgtttgaggcctgttcctggacaaatactttcccagggatgctagagagcaaaagcaggcagagtttgatagtttagtccaggggagtatgacagtggatgagtacttggccaagtttaatgagctagccaaatatgcacacttcaggagatcattgcctgatgctgatattcttgctgctaagttccagagggggcttagggagagcattgaggagcgggttgccggtagtggatcccgtgatatggatagcttggtgaggtagtgtcgccaggtggaggacatgcttcgtagacaccgaagcagtcagtctactccctcagtcagacaggagatgagaaggcccaatagttctggcccacctggtaagggtaagggcaaagatttgaaagtctctacctcatctgatagatttaagagaggctctagccagagtggctcagctcggaggagaccacctcctaaatgtccagcttgtgggagggagcactggggagtgtgcccctcaggtcagatagtatgtttccgatgtggcaagccaggccacatttctcgagagtgctcgcagacacactactagaaaaataggattcaacatcggttatttttgacattcgacatcggtttcaaaccgatgttgaatcaggcgacgttgaaagtctggaacttaacatcggttttgaaaatcgatgttaactacatcgtacgacatcggtttgaaacagaaacccgatgttgctatgttacaaacaaaaatttataaatgtataagattacaatataacatcgggtttcaccagaaaaccgatgttgtgttgtatgttaacatcggtttccttaacaaaaccgatgttgtgttgtatgttaacatcagtttccttaagaaaaccgatgttgtgttgtatgttaacatcggtttccttaagaaaaccgatgttgtgttgtatgttaacatcggtttccttaagaaaaccgatgttgtgttgtatgttaacatcgatttccttatgtaaaccgatgttgtgttgtatgttaaaatcgatgctgttgtacatgttaacatcggttttcttaagaaaaccgatgttgtattagatgttaacattggttttcgttgaaaaccgatgttgttttttaattttttttttaatattctttttgttttttgattagtgcagttcttcaacctgtaaatgaaaaaccagaaccataccaaccaaccaatttgataatacaattcaacaaaataaaatttcaataaaataaaatttgaataacaaataaaattgaataatgtcaatatatatgtacataaaaatgattctctaacctagtttatagaattgtttaaaaatccctagccttaaccacctaacttatgctttcatctgtaattctaagataaaatttagaccattgaatcctaacagccttcaatgtgtggtcttcaagtggtctttcgtcagtgaaatactgcatgacataataaaacataaattaaaaggtgtaaaacaaaaacaaagtcacaattaaaaataaaaatagtgttaaggctagggatttaccatgtcccagttgtccctgaagcctccttggactatcgtccacatccaatgcatgacatagtagccacactcagtgcttcctctttgcttattacactaaattgaatccatgatcattgttaaacagaaatagaaaattagtgtgaatagtaataaattattatttggaatacatgaaccatgatttattaaaaaacttactttaagcgcaatccatttagtagtagcctttgatttatttccttcagtgccatggaatgccttcaaagcactgcttaagataaaaatgcatgcatattgtacaattaacatatatagtcatgtgttagaaataataacagaaatgtgttacaaaattagaacctacctgttaataattgctttcagatagttatcaggcctatggtgcaacgagcagaaccacacgacaacattggccttaggacatatgacgaccagttgccaatgtgaactgcgttggagaaaaataagttattatactgcaaacattaagaaaactgtgttgtacatttttacttacccattcaagtacgctgcaaggtagacatctttacgtgaattctgcatccatttcttgagatagtcctcggattcaaattgagattggccagatctctgtatggactgtggctcgatgaatctatacacatcgggatgatccgattgcagacatacctcattcatatggctattgtttataaataaagtcaaatatgcatgaaattaaaagaaggaggaaagtaacattagatactagatagtgacttacataatccacagctgtataacagatatgctcaaacattgaccaccatggatgatctctgaaatatcctcgtgcctgatgtacaatgggaagtcatcattatctataccgaacatttgtgggtcccatgccaccttcagaggtgtcaagaagagatccgggatggtctttgctatctcatacaagggatcgtcagcatgttccggcttatttacatgtttcgccggtccatgaggtccctctttatcctacacagttaacaaacatcatcaataactgtcttaactttttatatgaaataaatgaatgttaaatgacaaacaatgaaggaagaaatgaaataccttactaacaataggttgtacaagatgtgtcggccaagcaaggaaggtgtgaagggcctgcccaacaaactgaacctcgtcagtgggaacagggacgcgagcatctgcgtctcgaacctcctcaacacccaccctcacctgatcactgtccaaagggatggaatgcactgctgtcgaccccggataaagtcttccaatagcaaccaagcggggaggatgctcatccacatacaacccacgcctgtcagatacaccggtgtctgggtcattaccggagggttcgacacagctctccttggtgctgacacgggcaccaagggtacatggctgaagctctggaggcggcatggctccctgagactgcatgtgggactggaggtggctgaaggacaccatcagctgctgggtaaccttctcagtgatcgattgagtcaatctctcggtgatcgactgagtcagaagtcatttgcccgctttttttggtgcgagccaacttccacttcatgtgtcgtcgcacgggggacggaggatgaatgatggtctccgtgctgtcatcacgagttgctccctccatttgcttcttttgtttttcctccatcagccttttctcgagcaactcgtaacccccacgagacaacacatgaggggcagtgttaagcctctgaatagcctgggccttctttctaacatcctgtaagaagtacacaaatatggttacaaataaataaccagtttcagagcataattgtttaattgtataacaatgtaaataaactaacctcccaggaagcggcttgccgactctcgcaaaaatgggtccactgtgccttactaaggccgtatttctcgcatacggcgtcggcatcatcctccttgccttctgtcaggacccatttccgtgtaagatctgacttaaattgcctccagcgctcacctactgtctgcaaaattttcttctttacgcgattgtcggacgcttcaggtatatcaaattcagcctgcattacaatcacctcagttatacaattacaacaacaatgaaattgaataattcatccagtgagaatacaactttaatcaataatacctgaatgtcctcccaaatcaagtccttctgcgctgtaggaacctccttccaattaggaatcgtgacatctaccttgtctctagccacaacccctagataggtcctcaacttctttgcctgaggaccatctgccttaccagtgataggatcaacatggacaactagtctctcagcaccaggagctctagtagccagtgacctcagtcgtgtagctttcctagtcctcttcaatgtagacggcgcaggtcctgactcaagaggaggtgtggactccacatgatgaggggagctcggtggtgtagtcatgatcctgttaaaaaacaaaaacaaagataagtcatgtttaggcattatcataaatgaaagttcaaagttcactatcaatgttccaatcatgtaccaccacatgccaattctatcaatcaaaagctgtcatcaattcaatatatgctcaaaatggcaaaccaaaattctgtacaaatcaatctgtgcaaacacatgaatataatcattctgaacaaagcctccattcaattcaatcttaaccatatcaacaaacacaaaaacaataaaacaaatgaatcctctcaagacaataaagtttctaacatccatgcagcattcaaattgaccgatgtgactatagagcatactattttgattcaactaagattgacagaccatgtttaacacaattaactctatcaagtcactattaattctaaataaatcaataaaatttattataaaatttgatccactaatggagcctatttggtgagtggaatattatatggaagctgcaagtgtctcataaggtgaagctgcaagtggaaaattgttggtatagtctacttacattaagtgatgttaatgaattctccttcatcatgatcattacgatttgcatgaacgtcatcaagaacatcttctctattgatgtcagccatgggtgtcgagaattgagtgacaccaatatcaagggttgaatcatcatcgtcaagattaacaccaatggtttttccatgtagtaccactgaccacctttcatcacacggatcttgaacataaaacacttgtttagcttgttctgccatgatgaaaggttcatcggtataagctaccttgttaagatctaccaaagtaaatcccaagtcctcagttcgcacaccgttgttgatatcaacccacttgcacttgaaaacacacacagtgaaagtaacataattaagctcccagatgtcattaatgagtccaaagtacggcaagcacgccaagcgtggattgtggtcatgcacagtagcgaagtgctgcgactcagcccgtaggctgaccccactattttgcattgtgctcttgtcatcttgttgtttgttatagaaggagtacttgttgatatcgtacccttgccaacttctaacatttcttttgggcccatctgctaacttcctcattgtttcagatgcagattcatcactaaatattgtatctttaaaccaactcataaaagtcttgttatgctctttcaacagcctattcttggtcattcttggattactctccttgagtaatgtctggtgacgaaccatatacggtaggacttcattactgttattcaggacattcaagtgagcttgttgcaattcctgcgaagcaggcgttataacatgcaacccacgtgtaccctttccttcgactctctcgtcatgtcgcgactggggaaggccaataggttttgctttctcaaggtattctgaacaaaattctacagcttcttcggcaatgtacctttcaactatggaagcttcaggacggtgtaggttttttgtataccctttcaagatcttcatgtatcgctcgatcgggtacatccaccgtaaataaaccggaccacacagtttaatttccctcaccaaatgaacaagtaagtgaaccattatgtcaaaaaatgaaggaggaaaatacatctccaactgacacaagataattgccgcctcttcttccaagtcatctaactttaccgggtccaccacttttgtgcaaatggtattgaagaaaaagcataggcgagtgatcgcatgcctcactttgttaggcaaaatgtctcgaatcgccacggataacagttgttgcattaacacgtggcaatcatgagactttaagccaactagtttaagatctttcatctgtacaaggctcttaatatttgaagagtatccctgtggcactttcactcggcgcagacactgacaaaaactgatcttctcctttcttgacaaagtgtgacatgctggaggcaagtaaattttcttaccatcggacctaggatgtaactcctgacgtatacccatgtcagcaagatcttcacgagtgttcaaaccatcctttgtcttgccttgaatgttaagcaacgtgccgatgacactatcacacacatttttctccacatgcataacatcgatacaatgtctaacatctagatcggaccagtatgggagatcaaagaatatcgacctcttcttccatatgcaagtattacctttggtcttcttttcgttctttccaaatacagtatggatgtcctcaacccgctgaagaacttggtcaccggttagcggaatcggggcagtttcattctcttgacttccattgaacgcttttttcaatcggcggtaagggtgataaggtttaagaaaacgtcgatggcgagtgtaaactgttttacttccgtgtttaagctgcaagtaactcgtgtcttgctcacatatagggcatgcacggtgccccttaacactgtatccactcaaattcccatatgcaggaaaatcgttaatggtacaaaataccattgcacgcaacttgaatgtttccttacgatacccatcaaacacggcaaccccctcgtcccataagtttgccaagtcttcaatcaaaggactcagataaacatcaatgtcatttcctggttgtcttgggcctgatatcatcatacacaacatcatgtattttctcttcatgcacaaccaaggaggcaggttgtaaattactagtaaaacaggccaagaactgtgttgggtacttaaactcccgtagggattcatcccatcactggcaagtgcaagcctaagatttcttggctctatcccgaattccggatacaaacggtcaatgttcttccactgagacgaatcagccggatggcggaccattccatcacagtttctcccatctgcatgccatgtaaggtcttttgcgtcatcttcattagcaaacagacgcttaaaccttggaatgattggaagataccacaacaccttcgcaggggggcctttatttgtactttcatcaatgctacagtcatcatcagccttcagtttgtaccgtgataccccacacctggggcatttatgcatttcttggaattcatttctgtacaatatgcaatcattaggacatgcatgaattttctggtactccatacccatcggacaaagaatcttcttggcatgatagtaacttcttggcaacgtgtttttatctggaagcatctcctgaactacctcaagcagtgaactgaagcttttgtcactccatccatatctggccttgacattaaccaaatttaacacggctgacaacagtgtcaatgactctttgcaccccggatacaatggcttcttcgaatcactttccaatgtatcatacataggggcatgtgcttgctcaaaatactcatgtcccagatcacggatcatatcctctaatcgatctccaatgtcatgatcaacctctttagtttgcgagaccctctgcgtgtctgtcaattcaccatgccatatccatgtggtataggtcttcttaatcccatcacacagaagatgctcccgtatgtcgtccagtgcctggtgtcttccattcaaacaattgatacacggacaaaaatattttccatccccatctggtcgacttctttcggaggcaaatttcaagaaatgttcaacgccttcctcatactcaaccgtgatgcgacttgcattcatccaacttcgatccatctaattaataactttgtgatagtcacaaagttattccatgcatggaggcctcacttttttcattcaaggtgtggccctatcccatttaggaagactttttttatagtatattcatatgtatagattgagtttcttatcttaaatttgacaaaattttggcagcatttcgctttggtctccgagtacacgacatgaaagcggtgacatgagttccaccacaatcaagtatgcacccggagaacaaagtgaaatgcatcgtaacgaaatttcatcatatttaagaaaaaaacacaacctacacatatgaatatactaaaaaaaatgagtcttcccaaactgtccaaacggacaattcaagaatcaatacaatgattcatccaaactgtccggaagaatcactgtaatgaatctcaaacgggaaactaaggttcactcaataatgaacattaattgtatagaaaaggcaaaattcatacttgacatacaaaacaattgtatacaaaaggttcactcacaatcaatgactatcacttgcattctatatttaattgctttacatttaagtttaacacaaggcttacctttcgcgaaggagtagaggctagcggtggcttggattctactgatggtggcagtgtaactgggctttcaggctcacttggttgctcttcctgcaaagaaatcatggtgatggaatgcaagtgatttacataaagtacgagttaaaagagatgtggacaaaacaattaagttacacacgcacgcattacatatagaagccaaaaaaaaataaccaaacatttgtaagtacctgagaggatggtcaatcacaaatgaatctggtgatcacgatatgcaaagagacaaatgacaactgcatatacaaatcatacaagtggtgtcagattacaaaacttctttcatacacatatgaacctctctagcttcacaagatcaagcaaagaacaatattaattaacatgacaagatcaagcaaaattttcaagtggaccaagaccatgacatagtataacacctttaattgaaacccctacggcaacaatgcctatgcagctccaaaagtgaataaatcaaccaaataaaatacaacaaatgcctatgttcatcactttttcattcccataattcatggtatatagctcatacgttttatcacaagtaaaataaaccaccacactaaaacttagaatccaaagctttaacaatccaaatacatattagccattttatcaaacacttagtgggaacaaaagtgacatcaagccaatatcacgttcaacctcttcgtgactcacaaataaactaaggcaaaaacacttagtgggcaacaaaagtgacataaagccaatatcacgtccaacctcttcgtcactcacaaaaaaactaatgcaaaaccatacctaacttgctagaatgataccattggaactttgcaatgttaggtgataccaacctgggatggagacgcgttcatggtttgcttgaactgcgacccagagcgtgtgacaccgaggaaatgggagcttcagcgttgaagaaaggaaatggaagagcttgagagcgttcaagaaagcaaatgggtcttgcttgagagcttggtagcaactgtcggacacagagaagtgcgtgagaatgagagcttgaggttagggatgacggacgagaaaggcgcgcgacagtggtgggaatgatttagggccaaatgtgttttaaaataaatacacaacatcggttttcgaatgaaaaccgatgttaactaacaaaccttaacatcggttttgtttaaaaattataaaaccgatgttaactagactagttaacatctgttttataattttttaacaaaaccgatgttaacaagtctctatgttaacatcggtttttaagttttctaacaaaaccgatgttaacagggacttgttaacatcggttttgtttaaaaatttaaaaaccgatgttaacatagactcgttaacatcggttttgtttaaaaatttaaaaaccgatgttaacatagactcgttaacatcggttttcttaaaaacttgaaaacggatgttaatatgaactacttaacatcggttttgaggtgtttttaacaaaaccgatgttaacaaagtccatttatttacaaatttgccaccgcgttttcgttaacatcggttttcccaataaccgatgttaagctagcgatgttaaaacctatttttttagtagtgacagggggtcgtgcacaggctgcttcagttgagatgatagcacccacagcaggtcgggtgtatacagttgatgacagagaagtggccagagctgctgacttaatcagaggtattattttgatcgatgcttatgatgtgaaagtcttgtttgactctggagctatgcattcattcatccaggacatgactgatgttaggcttaaattgcccatgtccagtttttctcctccaatggaggttatcaccgcatctagtgagaggtgtcaggtgagcacgtgctgcaaagaggtgcagttttagtttgatggcagagagtacatgattgatttgtactgcctagctatgcctacccttgagatcattatgggtatggattggttggccaagtatggcgtgatgttggactgttgtaagaagagggttgttgtgccttctgatggagctggttcgagttccacttctttcctatccgtcttgcaagctcgcaaggcaatcatggaaggagctcaggggtatatcttctcatgtgtgacagaagataagccgagtgttgatctgtcgcagatcccggtggtgagcgagtttgtggatgtattccctgaagagattacatagctaccacctgagagagagattgagttctccattgatctggttcctggtgtaggaccgatatccatagcaccttaccgtatggctcctctagagttgagggagctgaaggtgcagttggaggacctgctgtccaagcagtttatcagaccgagtgtttcgccgtggggagcaccggtgatcttcgtgaagaagaaggatgacagtatgaggctctgtgttgactacagacagctgaataaggttactattaagaataagtatcctttgcctcggattaatgatctgttagatcagttgagggaagccagggtgttctctaagatagacctgagatccggatatcatcagattcggatcaagcctgcggacatatcgaagacagccttccggtctcggtatggtcactttgagtattaggtcatcccctttggtctgatgaatgcccctgcagtgttcatggactatatgaacagggtattcagacctttcttggatcagtttgtggttgtgtttattgatgacatactaatctactcccggacggaggcggagcatgctgtgcatcttaggattgtccttcagactttgaggaaggatcaattgtatgccaagttggcgaagtgcaaattttggttatcagaggtgaaattccttggctatgtgatttctgcagttggggtatcagttgatcccggtaagatagaggccgtgatgacttgggagagacccaaggacgtatctgagatccggagtttccttggattggccggctactaccagaggttctgtaacaccccataggcctccgacgtgttatcattatgatatctgattagcacttaaaaacatggtttataaaactcagcggaagcacataatcgcttttcttgattcattatgtatggaataaaccaaatcacataaaattcacacacaaagcacatttggcacacccctgctgatccagtttctcacaacataaacataaagacagataactaaacttaggcagattatcaatatacaacaactatactcaggagagaaatctcatatacatatcagaaacagttctgtacaaacatatacatcagaactcacaccacatcgtgtgatacaaaagaatatcagccctcacagagggtatacagaactatacaagcatcatctggtgtacacccacaccatccctactcaagggtacaacatataaccaaaataatcaaaaatgagcctacaagctccatctgctgctatcagccaagcagaaacgtctctactcgggtcttctgccctgagactgctctcttcgtctggaagagtcacctgaaatcataaatccccaaacggggtgagataacacatctcagtaagctcagggtccatggaggcttctcctccaccctggcccacttccataacacatacatcaggtagcacaagcaattggcccactggcctggccctctagccctcataacaatataagcatatcatacaaacatggcggagctgcctcaacgcctggcggagctacctcaacgcctatatcggtgggagtctggaactcacacctgtgtcatcccattgggtgctaacccttcgcatggatgcacaatatatggtacctccaagaatagaaggagctacctcaacttctaatcccctggcctgtgggaatcaatcccctgggagctacctcaaccaagagccagccatgctaggaggaaaccataatctcccagggaggtccatatctatctattggccaacagatctatcacagtcatatcacatcacaaatcaagcacagatgcatacatatatcattatgaggatgcaactaccaatgcatgcatcatgaaatgaccaccactcccccggagtatggtgtggcacacaagatgggaattcatccccagggacactgaacttacctggcaaagtatcactctgcaattctttccctggtttgtggctcccgccaccaacagtcacaaaatcaagccctaattaaggcatatgcagtctcaaaatcaaaaccaatccacagacatccaattcacagaacataacatatcataattcccctatcctagggttcaatcagaacaagccctcactaggcttctcttagaccatacaaggtccaccatggctgcatacaaagcatctaagtcatcacagactctctgcagctcatctaacagagcataatctcacaacaaccccatggttcaaaaacactggaatggcctagaacttaaccaaggcactattccactagcctcacaggctcaacacaagcataatcaaagctctggcatgactccaaaatcacaagtgacttatcacacaagccacacatacaagccacagagccaaaattcaaagttatctaaatcaaaaattgaaagttaatccttcatcactaaaccattctaaacaagtttctctacaggaccctgggctaattctagccccaactcatatgggtcactattcatggaaacccccaggatcaaaattaaactgagaaacttgagtatcttacctcagtgacgactcaacagacctcaggacagcttccccaagctctattgtccttcccaagctgtgggtcctcgccactctcaagttctctaaatttttccttcagaatcacttctcactcaataggggtttttagaaaaggaaaatgaaggattatagctttccaaatgattttctcaagattaaaggtttttgggaggtgtttaggctaagaaactaggtcctaggaagcttggaaggtctttaatggaggttggaggttgagggaggaagaagacaaccttttcctctcaattttcacgtttttggccttaaatagtggccctgcccgagctctggcgcgatccacgccacctccctcgctatctgcgccacaatggcggtgggtccggcgctcctagcgccactcccgcgcctccagtgctagcttccagggactctggcgccctcagcgccacacctggcgccatcagcgccacacctggcgccatcagcgccagctgggaaatctgacgcccctggcgccaactttggcacccttggcgtggacctccagagatctcggcgcttccagcgtcgttctggcacccctggcatcacattccagagatcatggcgccataagcgtggatctggtgctctaggcgctactttccagtggtctggcgccaaccctggcgccatccgcgccacacccttaaaagggttttctgctgtgaatccccgcacgacagcgcggggtcaggcgccaaccgtgccgtgctttagggttatcacaggttcattcaggggttttcgcagttggtgatacctttgacttgcctcactcagaagggggttccgtttgtttggacccatgagtgcgagtagtgtttccaggagttgaaggaaaggttgactacagctccagtgttgacccttcctgaccctgagggaagctttgaggtgtattgtgatgcttccaagcggggggttggatgtgtgctaatgcaggataagaaggttgttgcctatgcttccaggaaactaaagcctcatgaggagtcttatcctacacatgatttagagcttgcggctgttgtgtttgctctaaagatttggaggcactatttatatggtgctaagctggtggtgttcagtgatcacaagagtctgaaatatctctttgatcagaaggagctgaatatgagacagaggcgatggatggagtttctcaaagactatgaccttgagttgagataccatcccggcaaggcaaatgttgttgctgatgccttgagcaggaagcatgtgagtgccgcctgcatgatgatctctgactgtgagttgattgagcaattcagagacatgcacttgactgttacagagggtgttcgtggtcttgagttgagagagaccgaggttgataatgatttaatccggaggatccgagaagcccagactataagggccgtgattggccagcgggatgtttcctgggaggctcatgacttggtgttgtaccaagatcgcattgtggtgcctaagggcgagttggtggatgttgtcctgtctaaggcgcataagggtcagtttagtattcatccaggtgccactaagatgtatcaggacctgaagagaaatttctggtggccagggatgaagagagacatagctgagcatgtggctaaatgtctggtatgtcagaaggtaaagattgagcatcagagaccatccgatttgctacagcctctacaaattcctgagtggaaatcggacaacatttccatggattttgtagtggggttaccgaggactcaggctggatgtgactccatctgggtgattattgataggttgactaagtctgctcatttcttacctgtacggactgactacactgcagagaagttggcccagctatatgtcagggagattgtaaggttgcatggtgtcccggatagtattatcagtgatagagatccgaagttcacctctaggttctggggtgctcttcaagaggcttttgggatgcagctgaggcctagcacaacctaccatcctcaaacagatggtcagacaaagaggacaatccagactctagaggatatgttgagagcatgtgccttggagcagggtactagctgggacagatacctacctttggtggagttttcatacagtaacagttttcatgctagtctgggcatggcaccctatgaggctttgtatggtcagaggtgcaggactccagtttgttggacagaggtaggggagagatagctgcttgggcctgagatggttcaggagacttttgagcagatccggttgatcagagacaagttgatgagagctcagagtcgacagcagagttattatgatcataaacacagaccgctgcagtttgatgagggcgaccatgtgtttctgaggctgtctcctgtcacaggtgtaggacgagctttgggtgtgaggaagctcagtcctaggttcattggtccctatcagaaccttcatagagtaggaccagtggcctataggctagctttacctccccagttgtcagggctgcatgatgttttccatgtatcccagctgaggagatatgtggcaggtccgtcacacgtggtggagcctgacaccgttcagattagggagaatctgactggtcctacacgacccatgcggattctagataggatggaaaagcggatccggagtaagaccattcccaaagtcaaggtacaatgggaagggaggacacctgaggaggcgacttgggagcgggagtaggagcttgtgcagctgtatcccgagttgtttgacaggtatgtctttgaattttgcagacaaaattcttaaaaaggtggggagaatataataacccttgggttaaaaaaaaatctcaagctagtagcatgggagtggcgctggtagcgtgggagcggcactggtagcgtgaaatggcagctgaaggccatttttcactggaatctggcgccagtagcgccagatggcgccatcagctccagatgcactgggaactggcgccagtagctccagagtggcgctggtagcgccagaattgcttcaggaagccatttttttctagaatgtggcaccggtagcgccagtgtggcgccaccagtgcgagagcacgggcaggcccactataaaagggtcattttacgagttttgggccaaaatcctttgcttcttcttcctctggctgtgcaccttcattgttgagaacccaagcttcttaaaccttcgtttattcatcaaaacaccttccaacaaacataaaacttgtaggaaaccacctaaagggctagaatccttcatcaattttccctaaaaagcctcaaacggagaaatccctttctttagggaactttgaaaaacttgagttcggcgaggaaaggaggcgattcacggacacccaagcttaaggaaatagttctttagccttccttgtcatcttagaggtaagaaactcgagttttaccgtttaatttgtgagattgattttgggatgaatagtgacccttttgagctagagctgaaagtaactttgggtcctttagaaaagtatgtttagggagttgttgtgatgaaggattagctttcaaatgttagtttcatggactttggtttttggctttgagaaatgcatgtgttggtattttgttggttaattgatgattataaaccatgcatgacccttgataattgctctatatgtgcctgagaggctatatgaacggctacattgtgtgaaagaaaccattcaaaccaccttgtggattcttaagtatttggcctgtatagagctttgagctttttgttttggcttataccgagtcttgtggagactctagagcctgggctaggccaagatagaccacagggctaggctgttttggttttatttatgttgttttggatcatgaggctggattatgtttataatgagcacttaacacgaaccatacataatgaatcaagaaatacggttttattatcgcttccgcggctttttaatcaaactaattatttgcttatctgattaaataatatgttaatacaccggatgcatacagggtgttatatcggctcttacgatttattgtagtttattctttttactaaatgcaatgtaaatttcctgcagatacattgctatttgattcgaaaattaccaagactgaaaggaagaacaagaacaagaagaaaaagaaacaagcaaccagtaagccactaggtgaatcttcttctattaattctccttcactagaaaagacacttgtaattaatattatggctggtagaaaaggataaagaaatagaccaccaaggaggactcttggtgactatgcttatcaacaaggaccaaagcattacaacaacatagtcattcctcatttcagtaacaagattgtggaattaaagccagcattgctcaatctgattggttcacacctttttgctggaatggatcatgaagatccatacacacatttgtctaccttcatggagctatgcagtaccatgggagcttttgatgaagatgttgaagttgtctaccttagagctttttcgttctccttgacaggaaaagcaaaggcatggctctaatcacatccaaacaaaagtctcaacacttgggaagaattggagcaaaaattcattgcaagattctttcctccatccagattcattagtgcaaaatcaagcattgctacttttttccaagggtctgatgaacctctctatgagacatgggagagattcaaatctttactgcagaggtgcccaaaccataattttgtgatgctgcacaactacatattttctacagtggtttgagaccttagactaagatgattcttgatgcctcaactggaggtactatgatgtctaagagtcctgaggaagcaattataatcattgactccataacaaccagtgattttcagagtcaccatgataggtctccagttcaaaggcaaggtataatggagctggatactcataatgcaattctagctcagaataaactcttgactcggtaaatagacgccttagcaaaacagataggccaacttcctcaacaatttcagcaaagtggatcatagaaaacacaccaagctcataaagttcaacaagtcctaagatgtgatttatgtggcggtgaccattagaatggctactgttcatcacctggtgattgccaacaggaagaagaggctcattatttgcaaaatcaaactagacctcaacataacttcaaggaaattaccaaggctatagaggtgatccaggttcaaatcagcctgatggctagaggcaataaaataataatgcttatgtaggtccttctaacaactcttttgcaggtccttctaacaattcttatgcaggtccttcaaataggggtccataaccacaacaagctcttagcctgattaaatgtcaaaaatagaagatactctaactcagtttatgcagatgtccatcacaaatcagaagaaaactgatgcttccattaaaaatcttgaagttcaagttggacaacttgcaaaacaactgtctgagcatggaggtggatctttttcagcaaacacacaggttaacccaaagcaacaatgcaaagcaattacaacaaggagagggactatggttggtttgaatgatgatggtgagaaaaatgaaaatgaaggagttgtagaaaaaaatgatgaaaaggaaggagttgaaaaagaaaaagagaaaaatgatgaagtggtgactaatgaagaaatggaagagaaagtggtaagtgaataggagaagcagaaatcaaagaaacaagcaactgaaaaagacaaagttgtactaaaccatcctgtgctcagcataaatcaaagaaacaagcaactaaaaaaggcaaacttgtactaaaccatcatgtgttcaacatcttcctttacgcgcttttgtgattttgattggtttatgtgtgcactttgatatttgtacacaaaggtttccctctttttggtagtacacattattgaataattttattctattagtgtagttgtagaatatatataactctttttggaacttaaacataaaatttttcttggacgtaacatgttttagaaagaaccaacaactagtgattttgaaacttgcttttgaattggatcagaacacaacaaagtgattttttttttggaaacattgaaaatgaaaaacaatgaatggctttcccaattaccaaatgaattcagatgtttttgcatggacttgataaagaataacttttgaaacattgatttgatttgaacatggaaacaggccttaagctttagtgattgtgtgcaatcatagattttacattgagtgtcctcactaatatgttctatagttgattttgcatgaatttctaattgtcataacatatgatgcatggatatgatttagtaattatttctttcttgtacattttaagccactagccaaaaatccatcccaatgtatattgttttaccattttcaagacctttgaaccaaacacttgaaagttgtttgaacactaacctaggatcaaattttcctaccttaggttaggagagcaaaggtgttatgtttggatttctatcatttggtggctaatgtgatgtaaatactttatttttaaatgtggttatgcatgtaaattaaagatggtataagttgggatctttgtatatgaagtagtgataacttggttagaaagggattggataggaagtaatgattcatttaagttgctagcttgtttatatgtttgctctgctattctcgatgtatttttgaatatccagaaaaaccaagatttctttcaggccatgcccaaccttaaaagccctaatgatccatgatgattttgtattttatctttgatttgatgggaaatgaattacaaaattgatttatgatgtatcaatgttggaattgagatggaacacttgcatgtgtgagaattatacacctttgagaggttttcctctattaactgaattaggtgctttctctaatgttctttagaaacaaaatgtgaattgatgttaatcgcatttggttttgtgaatttcatcttttgttatttcatttctcatttttaagtgtttgaaatgttgttctgatcactttggaggttgattctttacaaatcatgttcatagtttttggtgtagaagtattaaagcatttctattttatacctatcttttgattttagtagttttcttataattttgtacatttataaatgttgtttaaatatggaagatccatctatacattacgtatgtaaatgtcccttaattatagttgttttatattctgtatatttataaatgttgttgtttaaatatggaagattcatccatacattactatgttttgatggttatttgttggatctagaaaccaagccaagataaagggcataagggtaatgttttgaagaatttcagagtaccactcgcctaggctagcaatcaattcgcctaggctagtgagattacttcaacttgaagaaaccaactcgcctgggcaagtgacataacttcagcctgaagtaaccaactcgcttgggaaagttggtataacacctcttgcaccatttcatttaaaagccatgcaaatggaagaagcaaaggaaccataggtagaaaccagagaaggaaaacacaaagcaagtagagaagagagaaaaatggagttgatattgtatagaagtgacagtggattgcttccttcatcttatgttgatattgtactctagacaatgatcggctagtttctccaaaagattggatataatcttagtatccgtatgtatttcttttgatattatatatatatatgaatttttctactcattattggtgatttcattttgatcgtaatgcttgattctatttgatcacactggtttcacgaaattggattccaagtttgactagaaagtactcttagaatttgaactaaacgaatttactctttacgttatgttgctaagaatagagcataacgttttgattgcaaataacacgaatttaagattataatactaggatatttatttcataggcaaggaatcgatatttggtaaatattcttaggattctcaaatgtgaaggatcaattcgaggtgatttaatgtatgcatcagtaatgttagaaaatgattcatatgtattaatattatttgaatactgagggtataaacgatgaaattcaatcctacgtttctcttgaattaattaaattcattttacttgtattcataattttttgtatttccgatgcactacttctgttatttttgttaaaccatgatatttcgattaaatttgttgttcataactattgaattgtttacttttatatgaagaaattgagtacctcaagtccctttggagacgacctcttttatagaaagagattgttttgaaaaaacctgcatgatcaaattggttataaatcaatatttctatgatcaattgaatattgatttcggttgatgagaattattagacctagatcataggttcttaattgaattaggggaatattggtgtttggtgattgatttaattggaagtttattgggattaaattgggaaaaaggaatatgaacgaattcataatcctaggcttttccattataactattttctcacaaagttcttttaattttgctttaattcttctcttcgttaaagagtaaattgataaaaaaaaaaagtaatctttcttcatttgataaaaactcaaattgtgtagttacttacttaattgattatttgggaacgtgactagttttctgagttcgatattcaaacttagatctattgtttgtcattactatgtatgatacacttatccttgtatgaatattacttatacgcatcgcatgacaattgtgcttgcatgtggtccactagtaatcatgcaatccaccttaatttttaaatttcttcttaaaaaatgctaatcttccatccggtggggtccatctcaatgcatctcaaatgaactcctttatccaacagttcagaaaacttttgcaccgtacaacacttactcaactcatgcttgatagcagtcgtcatgtatgtataggatggagaaattggtatactttctcttacgtggtacatacatttatcgtaattcccaatataagaatcaaaataggggcaaatactcatataattccatttatctctttaaaatattccaatttgaaaaaaaaatggatatcttatatttctgttaaataaattatcatttcaacgatcaacttcttccataataatatctatgctacctagtattgtcataatattggttaatttcattcttttaactaattgaggaagaatttgtaaattgataaaacctggcagacgaattttccatctccaaggaaaaccatttgggttttacaaactactattccaacatattatgatataacgatttgttcgtcatgttgattatagttacttaaagatttgaaaagtaaatgcttgtcaacttgtagcgagatatataggtcgcaagacttggtctttgtttgtatttgaaatagaacaattaaccgaagcgctggaaagtagaaacatacgaaaggaaaccaattaattgttagaaacgggtcaaagtagcatcactcagactcattttgtaaatttataagaccacgtacacaatttgctgatgaccaagactcgtgttaattccttcaatttctttattctactacataaaaggcattcaaggtcagttatttggactatacaaagtcggtttctgaaccgaccttgtctccgacgacgttaaaaaggttagcgaacaacgtcgattttataaggaccgactttgaaaattttttattttttatttttaaaaaaaaaatagtttttctaagttggttatttaaaaaaaccgacttagaaacttagatacaaagttggtttttttaaataaccgactttgaaagactatatattgaccattttaagacggttgttttaaataaccgactttgaatgtcatattttttttagaagcttatcatacgggacctaacctgaatcgcgaactcgagaggttatagtggtttcggttttgtttcttctgctgctgcgggttcaaacatttggggctttttataaaagtgaaggagaaccaccatagcaaactaaaatggtttaatggcagaagaggaagagagatgggattcactgaggcagggagagaaaataaaaaagaaatgagagaaaaaaagggagaaggaatacggtggttgaaggtgagagaggagaaagagagaagagatgagaaattaccagacaaaagcagaagaggagaggaagaagatgcaaaagcggacagcctaaagccaaagcggtggtggtgtggtggtaaccgtgcaacgacagagtagaatcgacggagtaaggaaaaaagaagcgtagaagagaaagagagaaagagagagaaggaaggaaggaggtttgatttttaatgtgaaagagagaacgtaaggttggaatttataaggttgttggaatttcaaattcgaaattcaaattgaaatttgagtttcaaattggcgttgagcgagaatggctgagatgaagattctaagtcggttatttgaaataaccgactttgaatctaatatgtcaaaaaaaacaaaaaatgaaagaaaatcggaaaggactttcaaagtcggttgttttaaataaccgactttgaatgtaatatttaaaaaaaaaacaaaaatgaaagaaaatcgagaatgcgctttcaaagtcaatttttttaaataaccgactttgaatctaatatttaaaaaaaaaacacaaatgaaagaaaatcgagaatgcgttttcaaagtcggtggttttaaataaccgactttgaatctaatatttcaaaaaaaaaaacaaaaatgaaaaaaatcgagaatgggcatttttgtgaaagaaaatcaagaatgggctttcaaagtcgatggttttaaataaccgactttgaatctaatatttaaaaaaaaaacaaaaatgaaagaaaatcgagaatgggcatttttgtgaaagaaaatcgagaatgggctttcaaagtcggttgttttaaataaccgactttgaatctaatatttaaaaaaatgaaagaaaattgagaatgcgctttcaaagtcggttgttttaaataaccgactttaaatctaatatttcaaaaaaaaacaaaaatgaaagaaaatcgagaatgggcatttttgtgaaagaaaatcgagaatgggctttcaaagtcggttgttttaaataaccgactttgaatctaatatttaaaaaaaatgaaagaaaatcgagaatgcgctttcaaagtcgattgttttaaataatcgactttgaaactaatatttcaaaaaaaaaacaaaaatgaaagaaaatcgagaatgcgctttcaaagtcggttgttttaaataatcgactttgaatctaatatttcaaaaaaaaaacaaaaatgaaagaaaatcgagaatggtctttcaaagtcggttgttttaaataaccgactttgaatctaatatttcaaaaaaaaaacaaaaatgaaagacaattgagaatgggctttcaaagtcggttgttttaaataaccgcctttgaatctaatatttaaaaaaaaaacaagaatgaaagaaaattgagtatggactttcaaagtcggttgttttaaataaccgactttgaatataataattaaaaaaataaaaatgaagttaaattatttttttaagaaaatatgtaaatctttcaaagtcggttattatagaaatcgactttttgtagaggattatacaacgatgattaaaaaaaatccacttcgaaatgcgaaatcaattcaattatttacaaaattgtcgctgacctacctatcaagtcggttttcttacaaccgacttagaagagacgacgttaaaacagttgttattaattaatgtcctcattatcatgttaagtttccgctttttacatccatcaaacagaatatggagtttttttcaggactaaaaagggtgaacagagcgaaatatatagctatgacatagatagtttgggaaattaagcacttcaatttgacgattttataacttttaacaaaaaatttccaatcactattcatcgatctgatgaaattcattttgtcatatatagtccattgaaactattgtttttttctcaataactatttagccaacatctgatagagacaatttggataaatttatagaaaattttgtccttttaattgtcctatatacaattgatcgagtcaagatgtttccctgcatagtgctgttttacattatgaaaatttaaatcagtcgtttaaacaactttaagaaatttgaaatatcacatttaaattaagagaagaaagtatatatgttatgatggtcagcctataggagcatacatccttgctcttttctcacaaattggctagaagaatatcataaaaattaagaatagtgaccttagcatttaatagatatacagttaacttttttatcataaaaatttacatactcttaaaatagatagaattcaaattattgaaaattaacagtactacatgagggaaaaaatattatgctaaaacaaattaagaaacaagaaaagacaggccagttgagagatatttaattaacttctgcaccctcgaaacataaatcaacccttcagattaattattaacgatcactgatgatttttatcattgttttgttaagttcagctcgtgcgtgatatttacgattgactactgttgttggaagtatttgatagggtgtgttgaacgtgttgaaacatccaaaatccaacttcgcacaaattacttatcatacatatacttaaaagaaaagtacaattattaccatacttgtaataattatttatcatgcatcctgccaaaaacaaaatattggtattagttgttgaagaatatatattattaaactttgaaattaaattttaacactattttttgttaaaattttgtttatattaatttagttcttaaaattatctacgtgtttctaagagcatcgcaaaaccacattaacattaaaaatcacgttaacaaattcaattgatattagaagctatttcttgattcttttggtgccaactgtggacagagcgtgacaaacccacattgtagatttggttccaaacaaacactatgtgcttttaattatctttgttaaaagttaaaagtacattattttttatcaaatataaatttaattaagtaaaaagtaaattcaaaaagtgacataattttagctataaaaaatattttcctgcaaaatataattataagataacctcggtccattaagcaaggattaacggaactttaagaaatatcaaatatcaaaaaatcgtgtaagattatatatatgtgtgtgtgtgtgtgtatttttacataaaattcacaagattctcattcaataatttcaattttttagcaagacagacctttaaatgtttaataaacgcgttgcaaaattagaccgtctgttgaaatatttaaagtattggaaatttggctaaaataatgtttggtgtatatctgtgttaaatccatcagtaatctcgcaaaccaaaaatgtgagtggttgaatgataaaggtgagattaacgtactgtaatgtcatggtaaaatttatatatttttgtatttatgttacgactgatataatcaagtagttaagtgtatagtatatgcagacggtactataatcatatattatgatgaatttaatgtaatgaattgttagtataaaaactttgatattatcgatcaaaaattattattaatataattttttagatattataaaaatacaaaaaattattattcttaataatttgtgattaaatgatactttaaaataatttatattagttagtatataatctataatttattattattatcattattattattaatataattaaattaggcatgtaaaccctatatatatattaatgttctgtacaatgaaaaccaagtactattaaaaaaagacaacacagtggtggatctctcttgaggagattgcagtcagattttttagttaagtcagtactacagtggccaccaccccacctctcatctgaagtttatgtaagacattagaggtcccacatcggtaactttcaaactcatggcttctagtttgcttctcctcacaaagaaaatgcagaaaaaagggaacttgtgagtcctattattcattctggtgtctccctctttgactcaattagaaaaccaaaaacacaaaacagcacgccagaaaggttagagtacccaccacttcatatcttccacactaaaacactccctcaagcaatccctatcaatctaagatcccaagatatatagtagactcatgtggctctcaattccttgcttaaatatgggatcacttgcataaccttcttcatccatacatacatatccacattttttctctttctctttattgttcttttccctaagggttttcgttttgggtgatatattttgtgatttgtgtaccaatggaacagggtcaatgttggacaaataggaagaagtactctttgaacatcactagtcttggttcaccaacaaacccttcctatggtgactcatgggaagaacaagcttttgcagaagatgcagctaattctcttggtggctgcatatggcctccaagatcatacccttgtagcttttgcagaagagagttcaggtcagcacaggctctaggtggccacatgaatgttcatagaagggatagagcaagactaaaacaacaaccctctagcccccacaatgaaattctatgccatcatgaccttgaaactcagctccataataagccagttcatcaaagtcctcttgcttctttgggtggtttcctatacccctctcctgtttgtggactggcttataaaaaagctaaccctaattctgatcctgatttcgttgcttcaccttcttcatcaccctcactttccaaggccttattggctccatcagttaatattggtagcttcagagatgaaaccatgattccactttatgattcctctattctccacaagatttctcctgccagtaataattcttctgaagcatggccaaattcaggtgaagatcatagattatattcatgtaagttctaccctcaagctgatacaaagaaaccctccaagggaataatggattctagatgtaggggtaataaggggaataatgatgatattgatggggatatgagcttgaattcagttgtgtatagaactcacccatctttgcagtttgagagtactaaagagccagatcatatcagttgcaagaaaaggaaaacagatccttcctcaactctattttcctcaaagtcaagctcagttgataggcatcacgtgaaaccaaatatgtttgagtttagccctagctcaatagaagagctagatctggagttaaggcttggtaacaggcccaaggtatagtaataagtagcataaatagacaaagcaaccctccatttttaatgaatataaatttcttctctttttatgttcatcctagtttgttttcacttcttttaattaataccttacaattaaggaagcttttcatcatgtttgattggatatcctgagggcctcagaatgtatatctgcaaggtgtcatgataataacaatgctgcaattatattgaaaggcttgtaaacttcctcttattagatagtgtggccaaaaaggtggattgttttgaataaatacagattacatgactttgtaattgacggttccatcgatttttactatgatcttatgaaagttttaatgtaaagataatcttatagcttgctggctgcatacaatttgaatgctacaaatattaattctagtttcatccgacaattagtataatttaaattttctggcattggtaattactttgtaattacattcaaaaaggttaaataggattccaatgtaagttccatatctttatcgttatggccagagaaatatcttacttgagtcatatatacccagtttattaattacttcactgaagagttctctctatttccattgtcaatgatgaaaactaatacaatcaagtcttctaataatggaacaaaactaatgctttgtagtgtagttcattattctgcatgtggacaacttacatgaatttcaaattcccaaatctctgataggtataggcatggaatcactatttcagagtttagaaagatagagagagagaatctactgtgtgtaaaaactgttaaagtactgagagattagggcattattaaaggggtgaagtaaaggaactgagtataagaagtgcatggaataatgtgagctagctctttttcccatattcagtacctcactgacattccagcagacaaaaacaactaaactaaccctaaaagccacactgattgagcttttcacagccgcataaagtcagatacatcccaacattgattcccttttcctttggtattattctcatcacctcagatctgttgcatttagtagtatccccttacatacaaattaaatccatttgcttgtgtcctctctctcacctttctatctacctttcttctaaatccctccaaaatttgccacctactccggaatcagcccccttaaaaaaatgcctatcataatatgcttttgcattttaataatcacagagaatattatcccaccctcatgagtcacaggcgctaactacgtaagtttttggtttcttctgtgtgtcagaatttggtataaagtaccttcactttttgtgtatatatatatatatatatatatatatatatatatatatatatatatatcattagtcaacattctaaagctaatcttttttcgagatagagaaataaccaaaagtgaatacaatgtctcctaatattttttttttagagaatacaatattatcgataatccctctgtcttatttagcttatacaagttcattcaactatattagctaaaaaaataactatatcacagccttaatttctaagcgactcttttttttttcttttatacatacatggcggatgcaggttaagtcttatgtgggcaattgcccccacaagataatgtttttcacttatacatatttgataaaaacaaaatattacccccataaaaaacaatttttaccccaatagataaattttatttagatgaatgtaaaaaattataaataagagataattttttgttttgtccttcaaatatttttactggtttacttctattactaaatacatataataataataataataataataataataataataataataataataataagtcagcgacacaaatacgcattgatccaattgtaatttgttagagcttatataagtaatttgcatgtgtgtttatcataaaattatgtattttatataaatttataatactttttataaaaatataatatattatttttttcccactaaataaactttttggtcccaccagtatttcaaacagtcagaaattgaactttaagtcattattattgagaaactcacttatttaccatgtcaaagtcatgaattataaagaatggaaactgaacttcatttaccctatgaactctaaccctaggtggtcaagtttgttacaaaaattgctgcatgaaacaaggaaagcattctttatgatcattaccttaaatgggaatttgatggaacacccttttacttaaatgagcaatttgtacctagcatggtcattcaaacgtagctttcacataaacacaaatatgtatagaaaaccttaggccacacccaacatttaaattcctttgtaggctaaagaatgaagatagctttaatgatatgaaaggaggggatgtgggatttccttcctattatcgaattaagtgtatgcttttctcaatttttcatgtgattgagaaggaaacagaactgagaagcacaattaatatatataaggggaaacgaggtcctatttgtgtgtaagagagggagggttttaaaggcagttggtgggctttgtcttcttttggggctgtgagatgggtaggtctgatatgaacagtgagtaatctgaagatttttgggttgaagtggcagaagtgcacatgggaagaaagtgtcgtttctctattcacttgaaggaagggttacatagaataggactatcgagtaagtcagtgaattaaggagggtataaagggatattattattctcctgttgagcaatgtttttatgttaatttaatagactattttaaagaatcggaaactttaattgagagagcgagaaattccagtgcattgggggttggtattgtctgggggttttgttctttataattgctatgacaactaaggtctaggagtatatttttgcatgggggcaagttcctttgatcacgagccatttacattccatataaattagaatatctgatctctctctcatacatggtgtgtatatatatagttgaattgtgaatgtgaggaataggaggagcttgttataactataatgtcgatttatattatgctattaaacggttcgttaattaggatgtttcggcatttatttcacgtcacgatgaatttttaaaacacgcaaatatatattttcatatttgttataaattttgttttttttttaaatatgtattgtttatttttgagaatattctaatttttctttatttattatgctttcttacatttatattcacatggagagagggtgaaaattaaaagtcatacttccataataatggaaaactttttattgtctaatatacatgtaacttcttttttatttaaatcattttgaattttaaaaactattcccaagaatattaaaatgtaactaaacatttttttaaaatgtcctaaaatgatattttcatgttatatttcgggaaataacgtttatgagaatgtaagaacattccattaaacaaaaactccctaaaagtaaatgaaaatgtaaataggcattttattttttattcttaaatagtcaaacaattattttaataaagtgtcgttttcttacttattaattatataaattttgtattaatgataaatcaaatttttatatgatatgcatatgtttttctaactggatcattgatcatttcaactaatcattaaaatctatccttttgtaaacagtctttcatattaattattcaattagggttaaacaactaacaaaaaataaatcttattttaaacctcaatcatttattagttttattttcataaataactttcccaaaaatcaagtaaagtcttttttatagtttttattattttctttttttctaaattcctatttttattatatttcaacacatgaaaaaatgaattgaaacacaagaataagaaaagggttattgaattttcacattaacaacttaactataattttatataaagaactgtttataaaaatgataaatattaagaatgaattgaaatgaaactaaatttcaaggtatctatatatttataaaaatggtaaagtttaacggtacgtttgatttgttaaaaatatgatactagacatgacaaaaaaaatagcacaaaacaaagatacaagttactaagcacattagaaaaatataaaagttactaaaatatctaatattaattatcttaatataatttatatcaaatttaatgtatttatcgaaataaaaagagaaagagattaaaataattatgttgattagttactactttttattattaaagagataaaaaaatagaaaaatatgtgtctttttaatatttcgtacctgataggctgatacataaagttgcccataattttctaagtagcaaaaattataattttgtcatatcctcatctgcttgattatttgtgttgtcctctaatctttttcaaatcaaacatggaataaaaatatttattctatctagtaccacaatttttaacaaatcaaacagatctttaagaatcagttgaatgaattcaaagtttatagtgtctatttataaatgagataaatgttaatgatcaattatgataaaattaaagtttaatatttctattaatttataaaagaagtaaaggctatagggattgagtgatctttttcctaaatataataaatataagaattatagttaaaatgtaagcacatgacttgataattgactgtgtatgtattattcttagattcaaacatgacttaacatgaaaattttgttaggctatatgatttaactaacattatgttattaacgtacattttcctttactaaaaaaacatacattttccctaggtcatatagtgattctctccagggccgatcaagggtaaaaacaactaattaaacttaatttttataaaacaatattttctattaattttataaaacaaaaaaggccccatatatcaaaaaaaatgtcacagatatttacaaaagtcataaagtgtagctctcacatttatttttaaaaaaattattttaggtattatttgtcattaggctaacccgcttctctcttcaaccattccatctattctttccaatgtcaacatctatttcttattctttcccttcatttcacccaattataacttaaactttgcttttaatccctcaataatattgtgaactttaaaatagtttcaaaattaacgtttaccaaatgaacatgcatgcgatgagtaacagcttgaacatcgatcatctttgaagtgattaatttattaagtatttgataaaattatctattaaaataaatgaaatatttttttaataaaaatcttatttcatatttttatataaatttcaatttttgttttatttataatttttgtgaagtacatatgattttattttttttattaaatttaaacacttgtaattttttattttgcagatcagcagaccaacactacaaggaaaatgacttatgcctacagacaaaaactgtcactagaaattaaaaatgcgtaggtaaatgtattatagactttgtgctacggacattttgcccgtcaactttgagggggcgtacaatgacggataattgtccgtcattataggttttatctataatttactatgtgtgtaggtagaagttatgaacttattcctacacctttcaactgtaggtaaaagctatgaactaattcctacagccttcaactgtaggtagaagccgagaacttatacctataattttcagctgtagataaaagttatatattaataaataaataaaattctagaaatgctctctattgctatccattcatattttttcttcacaaattatcttgtacagaggacataaattaactattatggtgaaagataaatttcataaacaaaaacacaagtaaataaaattctagctatgctttctattgctatccattcatattcttttctatacaaattatcttattataatgaaagataaattacataaacaaaaccaaaagtaacatacatggttttatgtatttttttgattgactatatatttcaactaagattacattggattaattatatggcctgcatcatggacacatcaaaactatcatttggttagttttatgcgactgtaaggtatagagaattacttttcaaagatgaaaatgtgttatcatacttttgtacacatgccaaaataatttacaatcaaatttttagttttgttttcttacaatcaaattcaaacatgtttaaaatagcaagttggcagagtaaagctatgaagatatcagcaataagaaatataataactagttaattactcaactgcaaccttttcaaccaaaaacaaacttcccaagttctaagtaacttgtagctgcatctttctattatatttttcaattgaaagttaaatcaatcagttttttctttcttcctcctcaaatttcatcactctctaaacaaggtaatttcagaattcctcgttctatatgtgatatgttatatagatcagataacaagagaaaagaaaaaaagccaaagcatagcagaatatagtatcctcaattttttgtcttaagctaaagcttttcatatcaagggaaagcataaggagaagaagaactgactttgcaggtgattttgctggatcattagctggaggaggttcagcagtggtagtcttcttctctttggccttctctgtagacacagatgaggttgaatccgagccagagttgttaatggaagaagaaagattgagacacagattgagcacgaatttaaaaatgatacacaatcaacttcatgtatatccatatgtttcagtcactcttttcctttccaagatattgggcattcatctttaatttgttgatgtctaataaaatacgatagacagatttctcaatacctgcacatccttcatccaacttctaagttctaagcagcaacattttgctttcacacctgtcttatcacgtatgacaaacaacattgttgttttgtgtggactaaacaatctcatcatgacctgaaagcaaatacaagcatgcagttatataaataacaaccttttacattggaacctatttcttgtaatcagtaagtagttgaatgatacctgaaacactgattttaacatcccggtgcttatatatatatatatatatatatatatatatatatatatatatatatacacacacacacacatcatggtgcttgacacaattgtgttatatcaaagtctataacaactttcaataaccataatgtactaggggataaccaattaacatgcatgcattatatgtaaaaaaaaaacaaaagaaaaacctctagataggtaggattttgcaatgctgcacatgcagaaattttcgcagcaacagatacattatatggcttctttgcactccaaagatactgaattacactcaaaggttcaatgctccatatcccactcgaattaaacctgagacagtttgaaacttaagaatttaaaggaaaggcttgtgactcctttctcaagttttttgccacaacttggtgttgaatatatatgttatatatattaataataatatgttcacatacaagcccaataggttattgtatggttatatgggtccatatgggctggagcccaatagcttactatattactagggtttttccctacgctggaggtaacactgttgagcattccaaattccgatgtctcttggtgtaatacttcaagcacccttctctctcaaacctctttacctccaacaatcttgaagtattagcttcgtgtatcagttttgagcgagtaaggtgtcgtttcgaagatctcatcgagaggaactcaagggcgtgatcactttcatgtttcgacggaaggattgaccgggatctgagattgaaaaccttgcagccgcaacttttgagaccagatcttggaaatttcagccaatttcgtgggttgaaaccttgtgggttttgttctcctcgtcgagacgatcattttgagtggtcatttgcaaaaaacggatgtcaaacgaaggagatacagctatttgaaatttctgcaacttttccggcgacactgttcatcttctccgacgaagttttccggcgaccggcgactttccggcgacttttccggcgacttttcagcaagtcttcggcaaccaaaaatcattgttcctaaggtttttgggcgttccggactcatttttggggtcagatttgacaaatttcacctctatagtgctgttttggaaagttagaaggtttgacacactttggaggattttaaagtgcactctttctaactctttttattgattaaaatggcaaaacataactcccatgatatcataaagctgaaatcttttgatgtcactgaatttcatggttggaaatttcatgttcagtttggcatgaaggaacgtgatatattctatactgttttgagtgattttgcatctactgttgaaaatgtggatgaatatcaatggattaaagatgaagatttttgtagagattatttattaaactctttaactcctcgtttagctatgacttatagtgagtataagactgcaaaagagatctgagatcacttaaacagtcaatttcaaaagcaagagaggctttctaagactcttctagcagagaagttctttgactttaagttcaatatgaactcaagcatcacttctcaattaattgaacttgagaatatgagaaacaagctaaaagaggacaactctgatttgtctgataatctctttgttggtcttgtgttgagtaagctacctgctgaatgaaattcttttaagactgacatgcacagactaaaagaacagatggggctggatgaattaaaaaggtacattcatattgaagaccaaaacatttgtaggaagagtttggaacaagtaggacaacaaaagtcagttgccaacttagtttcacattcctataaatatcagaaaaagtccaagccaccaaaaggtgaattctcttcacagttagaggccaaaaagcctatcttcaagaagaagaagggcaagtgccataactgtggaaagtggggtcactgggcagcagagtgtaagctaccaaagatgctaaagaacaacacaccacaaaatgaggctaatatgctaattagtgaacctgagcctcaagccttcattggaatgatgaataatggaaaggccagtgtctcttctgaatggtggttggacagtggtgctacatgtcatgcgacaaatgatgggaatttactcactgaggtcatagaagtgaaagacaccgtggaaaattgtaatggtggtgaggcagaggtgactcatgctggaactgctaatctggtgctttcttcaggtaagttactaactttgaaacatgttaaagtagtaccttcacttaaaaagaatttaatatctatgagtttacttgataaagctggtatgtctttttcaactatgaatggtaaagtaactttatctgttaactcatgctacttcggttgtgcatttatgatcaatggcatgtatagattgagtttagatattgatagcataaaccatgttagttctactttgattgatccaaaattattacataatagacttggacatgtgaactataggaaaatgcaacttttatctaaaactcacaacattccattagatacttctattcgatttgacaaatgtgaagtgtgtgcacagactaagaatactagaaaaccttttaaatcggtttctaaaagcacaacacttcttgagcttatacattctgatctttgtgactttaaaaactatgtcaccagagggggtcgaaagtatctaatcactttcatagatgattattctagatactgtcatgtttatttgttgaaatcgaaagatgaggcttttgagaagtttaaggtttttaaatctagagttgaaaatcaacttaatttgaaaattaagaggtttaggagtgatagaggaggagaatacacaatgactgggttcaaggaattttgtgctttggaaggcataatacttgaaaccacaactccttactcaccccaatcaaatggtgttgcagagcgtaagaatagaactttaattgaaatgctaaattctatgttacttacagctggcatgccttcctcctattggggaaaagctgttttaactgctaatcacatcttaaacaggttgccgcactctaaattgtctaagacaccttatgagatatggcacaaacgtccttgtagatatgatacccttaaaacttggggttgtattgcctatgtaaggatacaagatcctaaaaggcctaaggtgggacctagaactactacttgtgtatatctaggtagtgcagaagatagtgctgcaaatagatttttggatctatctactaatacagtgatagaatctagagatgcagaattctttgagaacaagtttgttagcaatcttgacttgaaggcttttggatctacagatatgatttcagaatctcctgtagaatctataactggtccttctgacactaatctcacacaattggcttttgaaccaatttcagttagaaaatctacaagagattaagtttctaaaagttttggtgatgactttgtcacttaccatatagagggtgatccattctcctatcaagaagcaatgagatctagagaatccttactgtgggcagaagccatagatgatgaaatgagttctttgctacagaatcacacttggcagctagtcaatttgccaaaaggggctaaggctatataggctgtaagtgggtattaaagaagaaactgaatggtgacggatcaatagccagatataaagcacgtttagtagctaaaggctttaaacaacatagtggaatagacttctttgacgtttattcacctgtatgtcatctgtcaaccataagaattcttcttgctttgacatctattgaacactttgtagtgcatcaaatggatgtaaagacagctttcttaaatggagatttaaatgaagaaatctacatggaacaacctaaagggtatgtcatgaaaggccttgaggacaaagtttgtaaattgaacaaatctttgtatggtcttaagtttgacaatgtggtaaagagctatggctttcagtccagttattcagataaatgcctttactatcatttcatgtcaaataagatagtcatcatatgcttgtatgttgatgatatgttaattcttggctctgatcattctatagtgagtgatgtgaaaaccactttagccagagaatttgacatgaaagatcttggtatagctaataccattctcggtatgaaagtaagctttgaaaggcaagttatctcccttagccaaactcattatattgagcagctactttctacttggggatacagtgagtgtaaaccgagtgagacaccatatgattataacaaaagactgagtcctaatgaagggaccagtgtggatcagttaaagtactcaaaactgataggtagtctcatgtatgctatgagttgcactagacctgacatagcctttgcaattggcatgctgagtcgtttcactagtaatcctaataaagagcattgggatgccctcagtaggctgatgagataccttaaaggtactaaagattatgctctatgttattctggttatcctccaactatggatggatattctgatgcctcatggtgttcagaaattggaaatagtaaatccaccagtggatttgttttcactctgggtggagctgctgttacttggaaatccaaaagacagacgtgcattgcgttgtcatcaatggaatcagaactttttgctttagcctcagctggtgaagaggcagagtggataaagaatctgattatggatattcctttgactaaactaaagattaattctttaagtttattttgtgataatcaagcagcagtccaagtcgtacaaaatgctctctttaattcaaagagaagacatgtgagactgagacatgcattgttgaattatctgaaagaacaaagagttatcactttggttgatgtgaggtcgaaggataacatggccgatgctctcacaaaaggtttgcctaaagatcgattattcaaaacagtgggggaaatggggttaaagactatgtagacaagtcttaattatcatttacttaccttaaattgtgtattttgaattatcgaatcttcttttgttggccaaatgataagcataatttatatgtttcatcgatgatcatggttgctaattattttgaaaagggtgaattatctcattccaaattgatgagatgatttttaatccaaatcaaagttctatctgggaagcttgtgtcattccaaacttgatgatacaatcctaccaggttggcctatccttttggttaaatgatctcattctaaacttgatgttagattatttgactttaaggaattagtaactgtgacattccaaattgaaacatagaaatagttgattatataagaagcctattggtcttgttctgaattgaaacttgacattacaagactaagttattgtaagtgacgtgactattagtcttattatgtgatatgagacaatcgttattctcttacaaataaacttaggttgatggttctttataacttaaactatttaggctttgttcataatttatgaaactggcttgatgcttatgaacatgatactataatgctttatgacattgatatatgttcttctttgcttgatgatatgatgctaagttcttttagtagaactagacatctttagtagtttattcaaatgattgaattcatgataatatgaaattcatatttgacattctacaggggatggcaaagatggatgagagcttactaagtgggatcctgaaaaggatgacctacttgatatatgaatctatcatttagagttgtagggaacttgacagttcacctgctactgcccattatgttggagtccatttacttgagccttacattttgttatttctattttgtgaacattatgattattatgcttatttcttatatttgtaaggccttagactattttgactggcctacttatactagattgttatgcatatgttggttgtgaactgattttgagatcttgggaatttggtgagtttagattaatctaaaactcttgatatttatattgttatattgatctcagaatagattcataagaatgatgattcacttagtttgattgcaaatgttgtttgagtttaatgttttctaattaaaactcattgattgatccgagttgattgtcttggattggatgtggatgattcatgtttgtttgaacattacactgactaccttattggattgtgctgtatggtgaacataggaggagattgttgaatatatatgttatatatattaataataatatgttcacatacaagcccaataggttattgtatggttatatgggtccatatgggctggagcccaatagcttactatattactagggtttttccctacgctggaggtaacactgttgagcattccaaattctgatgtctcttggtgtaatacttcaagcacccttctctctcaaacctctttacctccaacacttggtaccttttattttctctccttgttgaccactactcaaatctcccctctttggttcaaatcaatgcaatgtgggattgcagaggaatcatcttagcctcatgactttcccattgaaatcagcctagcctaatggctatcctagaaaaataatcctggctctgcagcttaaccagcaaatcatcttgatcccaccattctacatattgtttgattttctgaaaagataggcaacaagcttaaagctttggtttgagggggagttagaatatatgaaaatattatataccttagagtatcttaaattatccattaggattagcttccctatttccccattatttcctaggctacataaatatgtgaacatgtgtcccagattttacttgaaatttgaaaacacaccaagtcactaacagtaacagtaacaagacaagcaatgtagtatgatcattcagccataacaattaaaccaagctacttgtagcatgctaaggaaaaattgttcaaaagtcattttttgtaccaattggcaattaccaaagaacaaacatgaatcagttatgaataatgagtcattataggaagattcatttttaaaataatggaagatagcatttgtagtaaagttcccataattttatcagaaatcactacgaaacttcttgatatcctttcctaaaaacgggaagtggcagaagctgctgaaagtaatcaaatcaaggtttgtgttgttgatagaaatggtatcacaatgtcaacaatcagttatgaataacaatgatggcgatgctgttaaatctcctctatttgtcaattaagaattctagagattagcaatagttgattcttaattatgaaataatgaaaacaattattttcaccactaggagtctgtaatcaagggcagttgataaagaaccaaaaggtcattaagttcagaaatatccagccagatctagaattatgtggaacgatatttaaatagtggatctccatatttttagaagtgctttagtgaggttaattaaaataacaactacagggttgttttcagtttagaacagtcattttgatcactgatctatcatgatttctacccatggaggtggactccacatgctatttccttattttccctctcattcaatcacacatgaactataatcctaggctaaatgattatttcaagaaatctatcacacaaatagagggaggggtatgaaaaaaattatacttgtattccttcatttggacttattgttattggtgaaactttcttcgaaaaattttcaagtaccaatcaagaaataatatttctatggatatatatgaatgagtaggataacatagtttggttgaggggtgctcaacttttgttcttttggtaatagttctccacctttcctcaacctatacccctccccttgaaaaccattcttgcccaactaattaaagcttgagccttgaaactggaaaaagtggagactcttgacttgatatagcacaagtgaaaaaaagttacagaatttgatgggtgttaattcataaattcaagtgatttcaaatatataggctacataaatatgtgaacatgtgtcccagattttacttgacaatctaatgatatcctcactagtgatgccttacttgctacctattcaatggcttaactaacaacctgctgtgcagtttaccacaaactatatgaagctggtaaggtcttccttccaaccaccaaataaaagttgcaagatgtcatttgaatgtacttttgatgcatgcaagatcatatgctataatttaatttattccagaatccataaagatatagaatattgatcaagtagtgtaaccctctttgcactagtgagctaagaagccccagaaagtttgatttcttctgcttatcaagtcttgttattactacaatgattaagaacacctaaataaagcaaattgtctaacaaagtttgagtaagttgtaatgcattggcagcatatgataaagaaaagtgactacctgggctctcgaggacagaaaaccaaatactcttctttaacatcatcagaaactttctggactagtgtggtgtcctgattcatcattacccatttgctgaaacaattaattgtaaatagtcaactatatgaaagtatctaaaacaaattatttcatcagacagtattattattgtatgcaacaaaacataaacatgccaaaatttagagatgcaccaatttatgatgcaaaggaattaattgttaatgtatcttgatttgcattaatggataattttttgtcaaattaagattttgggacaatattacttctgagctttatgctttaataaaatccctagcatccttgttacttagggataaagtttaataaccagtagtttagtctcctatcctttttgcataggttatattgcatagggtcatcactgatagttggttggtaccaaaagaaactatcatgagctcaacagaggaaagagatcaaaaggaaaagcttgtgatgggtcatctacaaggttgcccagaaatcaaagagtggtcagatatcatcctagtcctacacaaagtaagtgaaatcgttcactcccaaaataccatataatttaacaagattaatattttcaacaaattattgacatgatgttgtgcagggcacataccataggcttgtttctttcaatttggtttttagttcaacacaaacggggtgcaaattaggttccaaaacccaacaaaatgaagcaatgtatcagaatgtatggtcaacaaaagtagtaaaaataagagtgtgaatgtgtttgtgtgggtatgtgttttcgtttcgtagaggaaaaatacaggacaaaaacaacattaaagcaaataaagtggaatgtcaattggagggcagtgaaagacacttaaggttatatactttgtttaaagcactaccactatatgtttaataggtgccttcttttgcagccaaatcacatgtttttcataatacctaatataacttttttcagtgaactcatcaatccagatttttagcaaataaattaataaagttcctcatcatcattgagcatcatatgtacctagatacagaatgcttcccattttgattatacgcattcctctgcactgtatcactcaaaatttggtacacttcacccaaaatctgccaacatcacaaattacaataaacaactacaatatatagcaacatcaaagcatttaagaaccttgttaataataataatagtttaatttcgataaacctgaacttaatcaattagaaactactcaatatgatttgcatatagtttaaagtagttataactatattaggcaatcaacaattagatgagtgcattctaactaaattctagtaataataataaaaattctactagtaaacttgagagattgttgtggattcaagctacctgaagcttttcggtagcgtgaggatcgtttgggtttttatcgagatgaacttgcattgcctgtgatccaatatttaacaacatcaaaaaatgagaagagaaaagtagttaaatccataaatatttaacaacctctattccgctctcttcgccgatgatcatgctcgccctcatccctttcgccgtttgcctctccggaatgtttttcttccatgagattcctcccgtcgacaccaaggaagaggaagagtctacttattttgcggttttcaatgccgttgtcgtcgtcctcaccgtttacctcttggctttcgggtttgtgccgaaccctagccctctggtgtctcgggcatttgtcgtggttttgctacttctgttggtggcgccgttgggaatcccggtccactcttacttgaagggacacgagaaccgttgattcgcgaaaacgagaaggggaatgtattagcggaagacgcgaggttagtcggatgtgtccctctttgtatcgttgactattctgaaggtttaagtttctatttaacctataatctgggtttcggaagggataaattgaagatgaataggttaaatattttttattttacgtacaatgggccgtaggtatacgtttttataggattttacttgcagcatctaattatagatagaaatctttttatattttagcaagatttacttatgccaaaaattgtaggtataagtttttgagtttaacctacattaaataattgtaggtaaaagtatttttaaattttacctacattaatttatttgtgtaggtaaaagatgtatgtaggtataaggtatttttcttgtagtgcaagttactgatattgtgaccaaaccattgaagaatgatagctttttaaggcttaggaatgatttaggagtaatgaatgttgtagaactgaattaaggaagagtgttgagatagttaattcagttagttagttaataattgttttagctttatatggctttatgtgaaactctataaaagagtgcttttgtaattcattctgcagtgatatgagtaataagtttttcctatgtgatacaagcctctgttctaacatataatatgaattgagttttaacaaaattaagatgtgacattaacatatttcatgtttaacaatatttttttaacacttagtaaaaatgttattaatatgttttcgtgatattttatcaaatattatgtatagctcatatgatcatgtatattattacatatatgatttttaacatcattttttgtctaacacttagtaaaaatgttgctaaaaacttttgataatatttaaaaaatatcattaatgatattttttaaatattacaaaaagttcttagtaacattttactaaaatgttacatatgtagtgtgatgtcatatatattctttcaaaacttatattgaatgccataattaaattcacatggaatcatttttacaccctacaattataaataattcaaacacacatgagtaaatttagaagatataagattgagttggtagtaaagaaaaactagtgagtatgaataatcctattaacaaaaatttatatataaactaataattaatatttatagataaaaaaaatataagaacgaaagttaaacaagtttatatatatctttacctttttcaacagctctcgcctaaagtatgaggcagtgacgtcgatgtattgaacttccacaaaacatcatcgaatatcttatacgaggattcggtccattccccaagtcccccatcttcgacccgatccaggaaaaacaccacgggcctcttacacaggtcagggctaactggtcgggtactgaatgtaaatgggtcctcatacccacgccatgttcgaaaagttttaaaagccgtttgcaactcaatgggtgtctctagagaatggtacaactccacgttgtagccccaagacatttagaatgtccaatttcgattcgggtcatagcatatgctcttctggagtgtccatttgtttagcattaacaatgcataaaattaaaatcttatattaatttgtgaaccatttgtttccatttaacagtataattttatacaacattttcaagatttttcaagaaacattattttaaaatctaatgttaatttatataattaatgtaagaatttaatttaattatactcaatataaatgattttttgattgtcactcaatcacaaattattaagaatgataaatttatttaatcttataataattagtttaaaagtcttatatcatgatttttaattaattgatggtgaaaaaatctttatgttgaccatgcatgaaaattaaattgttatgatatttcaaaaaataataatttttaataaatatagtaaaagaaactttgcttttaatccctcaatgatattttgaactttaaaatggtttcaaaattacgtttaccaaatgaacatgcatgcgatgagtaacagcttgaacatcgatcatctttgaagtgattaatttattaagtatttgataaaattatctattaaaataaatgaaatatttttttaataaaaatcttatttgatatttttatataaattttaatttttgttttatttataatttttgtgaagtacatatgattttattttttttattaaatttaaacacttgtaatttttagatcaattattttaattatatttttactttcaattattttatttttttgcaaacttgtgtttgctattcatcttatactatatcctaaaatgtttttaattgattttaaaataaagtaaaaaaaaattacttttaaatatacatcattgcttcaaaagatgtcggcatcacaataaccatagggtcgatacaatggtgtaagttgtctttatcaacacgactcgttcctctttcttcattagttggaacaactttgttatgtcaaaaaacatttgttttataagatgaattagaaccctgaattttttttattagatgcaaataaatataaaggttaaaaaagatatcttatgcgatattagactatgtttcatgatcctgcgtttgagacaaaagtaggtttaatccatgatctgatataatattaaagacaacatttaagaattcatttaatattgtgtttgagattcgttttgcaggatctgatataatattaaataaaacatttaagaattcatttaatatgtcgaatcccatgaaaaagaaatgaagttcaagtcatgtgaagttgtcaaatatcatcaaaagatgtggtctactatgacaaacatgctttgaccccaggaagtgatttcctattgcagtgcttagcaaaaatgtaaacaagagtgatttccagcatgatgaaggatgtatctttaatgcaagcattaaatgccccaacgaccaaaaatttcaaatgtaagctcaagtgaaaaattattgtaaaaagctttgaagaactaggttgcgaacctacacgctaacattcaaattctttttgtaaaaagatttgtatattcttgtaaagttcttaactctcaaaacaccttgaatgtctttaaagaaaagtctaagtgcttagattgtgaatctgtttggatacaagattagaaatacttttgagagtttttctactgaaaaaagctctatattacccactgaaaagctctcaaaaacacttatgacttatattcaaacaatctatacatatttgtctattaaatgtttaaaaactagtcaatgaaaccaattaacaacaaatatcttttgatttgtaatagtgtcaataatgacttattatgacaaaaaataccaagttgtttcaagtttaatacagatcatgttacccatattttaacaaaatcatcaacatcttatgtttgtaaccataccttaattattaataaaatttcataatcgatatttacttaaaaaaggtgatattattaataaatgttcttttacttttaaaaaatgaataccctgaactcgttcatgtttacatcaacatgaatcgagttcatttaatatttatgcttttgagaaatagtaatttatacttattcataaactagttgcagaattattttgtactattaattagtacgtatcagtcaacggtttattaatttattttaaaaaattatgagcgaatttagttccatactcaagttgtgagaatgtgagttgtcatagcaaaagcggaactaactcttattaattactagaagttttatttcctttgttatgttctcatatagtcaaagtgtaacaattatatgttatcaatatacatttttacaatattttttaataaagttttatttattaatttcttaattattagttttaagataatgttcgcaaaattgtaaccacttaaaacaaaaagaaaatctattaataagttataagtctcttaaaaacattaattaattaaaagttaataaattcttttttgattttgttgacttttaattacaacaattatcttaagaaaattatactatcaatgattttaaacagtttaataatcataacaatataaaataattttaagatattatcaattaattaaaaactattcttaatatgacttttaatatatttattatgaaagttaacaaacttttattatatgtaatatgttgtgattaataataatgtaaatttattttatattatataatttatttttgtgacttcaaattggttaacaatataattttttatatattgatattgcatactaattaaacaatttttttttttattaaaaatcatgatgaaatatgttattaattaatgatattagattctatagtctaccattcaaaaaaaaaatctatattctacaactaatgatattaaacgtatagataaactagcggaatggtttaagctctcaactagaaaatatattcttctaataacattataaaaaactattatatttcctatatatagaaattttccatttaacactactaaatcttaatggtccggttctattctcaatgttcaatcttgatttatattggttggcaaaagtagactatccttatgtaacaacaaatagtaactatctttataccacgcaatacgcatagcaggagagtttggtacattatttttaatggataataactatgccaaactttttaattgcatcaggaccagaaagtggtcaaaagatacaacatgctgaaaccagcttgtattgacgttttgctttaatccgatggaactaactatttaacgtaattatatatttaatatataattaaaactactcattaaacttttaaaaaattatttcagacacgttcaattataattaataaattttaatagacgattaataatgtattccaatatattttttattattgataaaaacttattaagatttataaaataatttagcgatattttcaatcaaggaactatgatgaaatgttttatttaatgttttatttttattacattttcatataataatattaccaagttttgaagaagtatagaataatgacaaacataatttctccacattcaatttgcattcaacattatgtaataatcgactaagataataaattgttttttcggttccatcttctgcatcttacgctagaaggcatctgatcaattcatctgcagtcgatatatacaacttcgaaggttttctgggtattgacaatactaaagcttggttcagctaacacttgcttgatttgttcaaatgcttgatagtattgtttcatctccccatatgaactccttttaatcctttaccttcagtaaaggtgaaaacaaccttcattttgctagctaaattggctatgaatcttcgtaagaaatttatcttaccaatgaggtttcgcaactcttttttattttgaggtgacatggtcccaatattgctttcaacttgtctttatcaacttcaattcccttcggatgtagtaagaaacctaggtagtatccagctgacacgtcaaatgcacacttagctggattcattttcaacccatgaaacctcattttttgcaaagcttgctctaaattagctaatgttgatccaaatcgtctttgtctaccatatcatcaatgtacacttccatgttcttcccaatagcatcatgaaaaatgagatacatgttcgtttgataaatggctgtaagggcaaaaggaggagagggatgaggagtaggcaaaataggaagaaaagaaattgtcaaatcattcatactcattcagtcatgaattgatccttttaaagatttacaaaatcctaattttgaaattcaaataaaagaatgaaaataacaacttgtcctaattttgaattcaaataacaaaatagaaattcaaataacaaaatggaaataacaactaatcctaattttgaattcaaataacaaaatggaaaatctgttagagttaggtaagtgggtgatgaaatctatggtcagatctgtccagatggtgtctagaggggacatgggttgtaataggccatatgaagagtgattttgtggttttattttttgacactcctcacatttttttacaaaattcttaaaatctcccttcattcctttcaaggtgaatactttattgaggcgcaggaatgtgttttgaactcccgaatgtcctcccaacaaggaaccgtgaaattcatgcaaccgtttattcttcagagatgaattctccggaatgaagattcttgagttgtgtagtaatattttgttgtgcattctctattcgcccccatttgtttggttctgcaatcatcccttggatgactgtaatagcgtaggggtcttctgtgatttcctgttgtagtatgcttgttagattgcatgttggtcctgtgatgactgctagttgtgattgtggttgttcattaaccccttctggacatttggacaatgcatctgctactgcatttgttttgcctgtcactctactagataaattttcaaattctatttggtactctcgtactgtgcctgtttgagttaacttgcatagtgtgcctgcaggatcttcatatgcagtaggtctatatcggttaagtattgcaacacgaaattcaccccaattcgtgattaatccttcttgtgacaaattgcggtaccagcttgatgtaggtgcgtccaaatgaaaggaagtaatgcgaagaaggtatggtaaaacaattgtataatactcgcagtattgatcaactgcgaataaccaatctataggatctctatggccgtaacatgaaaaatctaaacgtattggtttgggacgtggtggttttgttcgagtcggacctagacccaaaatgcttgtgtttgatcgttgtgtttctatgaaacgcgtcatctcttgttgaaaattatccatcatagtattaagttgctcttggtatttgagttgctgttggtcaataaacacctgttgttgctcatcacatgttgtttgttgctgctgaaacggattcagttggtcttgtatctgagccatgcgtgttttctcaaccatggaggtgaattgttggatgaaagcaccaaatgtaagggcaaaatgaggagaaggatgaagagtagggaaaatagggagaaaatttttgtcaaatcattcatactcattcaaccatgaattgatccttctaaagatttacaaaatcctaattttgaattcaaataacataatgaaaataacaacttatcctaattttgaattcaaataatagaatggaaataacaacttatcctaatttgaattcaaataacataatggaaataacaactaatcctaattttgagattctggatgtagtctataagatgtattggactcctcttggtacggatgggctttgggtagcaatctggtccgctacagtggcaccaacatttttaatccaaacgacatgactaaccattcgtatatctcaagagctccaggacaacaaaatgtcatttgtgcacatctttagcagccttaaaaatctgattataaccagaatgaccacccataaaggtaagaacaccatgtttggctgttgcgtcgactaacatatcagctacgagcatgacatactcatccttaatggttgccagatttaaatccctgaaatcagtacttttattttcccattcttgtttataaatgacacaatgtttgataaccactcagtagatctggtcgttataataaaaccaacccctaacatcttctgaatttctcttctgatctgaggtagaagttgcggattacattgtcttggaagctgttgatgtggcttaaatccttctctaattggtagcctatgttccactaaatcttttaatagtcctaacattttgtgataatcccaagcgaagcaattcttgtacttcatgattagttaaataacatctatctttctcggctaacaatccactaactttggtcaatcttggcttatcattagttccaaggttgacctcttctaaaggttcttgtgccttaaactaggtgattccttgataggcaatatcaccttttggtgttttatttcctcttgtgcatcaaccatagctgatttggctaccctatccttagtgatgaataaatttagtcgattcaatagatcttgcaataccttattatgtctatccatctataaactcaatggatgatcgtgcttcgacttgccagtttatagtgaccctttctaagtcaaattacaagattcccaagtcccttcctcagttattaggaacatgtatgggggaaaaataaggaaaataaagtaatgcctcaaccattctttcattagttggaaatggacaatcattagtgttgcgaaaatgacaagtataccgctcgtttcaagtaataaagtaggtaagtaaagtatcgtatccacagagattgatactgatttcacaataatttgcagtctaagcaattggaagggaaaagaaatgatttttgaaagaattgtttgttgtgttgagagttgagtgattaagtaaatgacagaaattaaaaaggattaaaatgcaagtagaatgagttgtaaaccaatggacgaataattgtgattaggacgcaatccccttttgatccctacctcttccacttgactgattatcgaagtcgattgtttctgattactcagagaataaatcttttctaatttagctaatccctaatcccttagcgaattaaccctttaacctgaataaaaaccctaatccctcagtgatttctatcaagttaagcatttaaaagaatatattataaagttttgcaatcatgcatccctatccctaggcaatgaacaatcgttatcttactcatgtcagaaattagaatcccaacatccctattgcgaatcctaaccctcagaacttagatagaatggccaattctaagaaagagtataacaaataagaacagagtaaaacaaagtaatcataacaatctcattcaataccagtcaaattacagaggagttcacattggttcttggcctaaccacaatacaaaatttagcctgacatagttatcaaaaacaccgaagcatacatagaagacattattctgcagcaaaccctagctttgattctatgtaggagtgatttccaatggtattccaagctcttgaaggttgtaaaatatgcttttcttcagcccagaggtccctttttataattaccttcagtatggtttaatttgggtaacaaagcaccttcttcctctgtattttcgagccagataatttaaatcaggaaacagaatctttatggcgccactggcgctcgtgctgatcgcgtgggctttgcggcttagtggcgctgttagcgtggcctttcacgctgatagtgtgacttgttcgagctgaatgactggtccctgcatgttgccacgctactcgcgctgactttcacactgatcgcgtgactgcttcgagttgaaaggttgacctttgcttatggtgcgactcgcgcggggtttggcgctactcgcgtggattattcgagctgaagcttggcaatttgtactgtggcgcaactagcgtgagatctggcgcgatccgcgcgagaccttcagcttggttttcttcttctttttggcttaaatctcctccttttggccctgaaatcatgctttggaactgaatgagataaaattaactataaatgataaacttagcctattctgatctaattcctaatgatttaactgaattataacctaaaactagcctaaagctaagatgtgttagcaacacatcaaataattcctagatttaaaggttgttgtcctcagcaacaaacataacctcaaaaagaaaaacaaggatcaatgatcaaattgaaccacaatttacagtcatagaaccatcatgccgagtataatcaatttgcacatcaaagctttccatgacactttcaattctgtcaattgtgagagttaacttgagtgttcctcacagaatgtgtttgttccgctcatcactcaagtgtatcaggttatgataatctctcactcaacatagtcacagcactaccataagcttgagtatattctcaacagatgcaagcacaactaatcaaaaggtcttttccagcttgtaacttggctgggctaagggtaggaaaaatttgggatagtagctaaaatgaggctagatccagatcaattcctaagtccctatcttgtggtcatccatattccttgttcatccttttcaaaacttggcaactttatttaacaatttattctttatggtaactaaacaaaacaattaaaatcagtctagatcaaaagctttttttttttttttaaatgtagcaattataaactaaacgagcagcttttcaaatttccagctgatactttcagacttattgttttccaactggacttatgtgtttatcctctcaacttcccataccaattggattcaacttgggttcctctgtgccttgatggacaattccctgttttctactgtcatggacttgtattcttctttctctagcctcagggaggttggtcactgtatatggttttgattttgggcatctgaaatgaaaggctcaggctcaaagaggtagcaaatggaaaagaattgagggtaagtcaatttggccctggttttcagaagaagaaattgccttaatcatgtcaattcatacctgcatccaaagaaacaattcaagttctagagaactatgaaaatggagtctctcagaaaaaatttaccactgtttggctcaaacctcacaggtactagactcaagtcaatctctgctgacttcctttcaagtatcatttcaacttcaacatgcatatcacataccaacaatcacaattccattcatgtattatgcagttcatgctatgcttcatttcgcacaagctttcatcagagatattctatccattactgtgtccattcacttttattctgaaaaatttgatgtgcttctaacctttattgatttatttttgaaaatttttctgttagacgtcatttgtttcttgactgtgatttgcaaaataatgtgtatgcgcatccattcccagatttagaaattgttgtccccagcaacaaccaataaggttacaacgctttggaaaaattttcatcatttcaacattatttggaaaatcgtaaccaaaccgaaacattaatccaaacaggttttatgcgcaaaattgaatcagaacaaaactatatatatatatatgcagaaatataacagtgtgcagaatgtcaaaatgtcaaaatgtcaaatgcagaatccaaaaataaacagaaaacaagaaaaataaatgtggtcctgtcactcctccccctctctcatatcatgtacagcctcaacctcagcatcagtagcttgagggggctttggaatggctgtctctgcctctgctgcagcatctgagggaccaggaggagtagtagctggtggtggtgtcactggaatctggtagtcactgggggagactccgcactacctgcataaggcctccaacatacaggtctgaagtgtcatctgggtgcggacaaactcctgcagagctaagtagctgggagagtcctcatatagcagatcatgtccgggggcagtgggaggagcaggtggtgttggctctggtggctggggctcttcctgcggaggtgcatcgcgaggactgcgagctgcaagttcctctggtttgagctttgaagcttagatcacctgttcttcagcagcgcttttcacagcatctaaataagtcttgtagctcatgagtgacgcaatctgaacgtccataggctcgtcatctaagatttccacacctgtgtgacgacacaggtgcaaaatcagagacgaatgggcgagccaagacttgctgctggcatcctggatcatgtggagaatacggttagacaggatgttagaaatgtaaaggttaccttcccctcggagtgtgtatagcagggcagccctctccacattcacatcagtcatgttagtagaagggatgactgtgtggtttataaactgatgccaaaaagttgcatcccctactaagtcatgctttctcatcttctctggaatgtactccagccctggtttgggcttccaggtggtgtagaggcctgtgatggagtgtctaatagtggtggcaagctgaggtacgtcatctcgatacatctttgtaagagcatccggctgaatcctcaggaagaggtggctgaaatcacacccttcaaatggatcatactgggtgtcaaggaagcgctctatcgtcttatcgtcaaaggggacttgcacacccctgacccagctaatcctgctccttgccactgtgggtgggtcaacgttggctaggaactccttgaggatcgcactggagctgggctcggggaagcttaccagcctctgccactggcgtctgacgattacttctagcactgggtttccttttggaagttcttcccataagatcttcttctctggtatgatcttcttaggcaggtaccaagtgtcgaatttctcctgacactcggcggagcggaactgggcttcatcatattcagaaattctggcccgtttaccgccacctactgtagtgctcttcttcttccctttagccacctgttttccctgaaactcagaacaacatctcatatatacacaggatgccatggacttaattcccagatttattcctttcattggtttagcccaaacaacaacaactaatttagtatcactttcaagccacgagttgtttgttgttcaattattcccatctttgggtcaataaagttagggttagcaatcaaaagttcatcatatacaaaacccaaagacactctcagatacatgtaatttcatattatatatacaattcgagccataggtatcagagaacatttatcacctcattattggggattactaatgtggattcttagatttagaacagttcaatccctaacagcttacacagaaccaatatcaagaagctcaacattttcagtcaattcaagttttcatcagaattcctattggccaatcagaaagggaactaaccattctaggttcacaatcctgactcagagcaccatgtattcaatcaaccacacaccttaagtatcaatgttacttgacagtttaaaaagtcagcataatcatgcatattcttagaggacagcaccatctggtttgttcatttaattcattcacaattagtacaagtgattattctcaataattcccagattaggttcattacatgtgctaaccaagatacaattcaactattttattcaagcaccaattcaaaataccggtttgactaggaaataatatggaaattatgacagaaaaatgaatagcacactccgaattcccagatttagcttagtgaatgtctctaagtcatctgatcctaagttatcatggatacaatccaacaaatcaaatttaatcatcaaacaaatataacatctcaacatcatgtctatgtgtccattctttagttcaccaaaatcagagcattaaaactgctacaccaaatcaatgtggttcatatcaacatcaccaaaccaatttaaccacaataactctcatgtgattcaaaatcctgatcaaagaaaccattcagttcaattccaaatcaactaagaccaccaaatagcagatggatcaatcatatcatccaataccagcactttcagtaaccattagcattaaagagcaaacacattagggtattagcagtgataggtttaattgatctcctaccctaaggatggaccatgaggttcaatgcacactatgcttgaccattatgcaaacaatttcaatttccaagaatgtaccggttcagaacatactcattatcagtgttaagggtttcaattcaaattgggtaagcttcagatagcatcaagttctcagtaactatgccactcattgctattgaggttcaagaaagcttaccttatctctagccatggaaacaaatgcaaatttttggtcctaggttcgctttgcagagagaagacgagactgagagggaatgcgagagagtgctgaaagctatgaagagggtttgagatagaatgggatagggtatggcttttaaagggtttaatggtgattggtgatggtgaatagggagttggggtgagggcgagctctggggagtgattttgggagcagaaggcgtaatcccgcgatttgggtgatttaaaataaaaactggtctcgcggtctcgcgcggttagcatggaacatagcgcgattcgcgccatgagtcactggaagggctttcatttcgccttattcgtgcgatcagcacgcgatgtcacgcgagcagcgtggataacaaaaatttagaccaaatgatgcgtccttatcgcgctgatagcgtcaccggtggcgctaatcgcgtgagtttcctcttggaaggtgttttagcttcgaaaacttggtgcggttagcgccatcatccacgcgatctgcgtggaaccttgaaaataagcagctgaattcaaacacttggcgccagtcgcgccatgtaccacgctattagcgtgaaataatgcagaaaaattggctttggttcgaacagatcacgcgtttagtgttaagaaatgggcatgagccacgaaatgatgacgctgtcagcgcggtgggtcacgcggttagcgtgaagcagttgcatattggcgggtttagggcgaaacctggcgcggttagcgccatgcctttgacaacttttttttttctttttgtaaagcttttgattttattaactaacatgcatgaaacctaaaatgactaaaatgaaatatgcataatgataaatctactgctagtaataagaacttaaacacctataaacctatatatttacatccgtaattaattttctcggaaagattccaagaaatgctcatttaacgtcttgagctagatgcttcctccttgttaatcatctgtgggattgagtggaatagaaaccgcgtttctatccacatcccctccgaaatagtgctttaatcgataaccatttaccttgaaagatctgtcactatctaagggggaaatttccactgtgccatagggataaacctcgcacacaaggaatggtccggaccatcttgattttaacttacctggaaatagtcgtaggcgagaattatacaacagaacttgttggcctggaacgaattcctttggacggatttgattgtcatgccacttctttgtcttctctttatagatcctgacattttcatatgcaactaacctgaactcatccaattcattcaactgaagcaaccttttgtcattagcttttgacaattcaaagtttaaaaatttggttgcccacatagctttgtgttccagttcaatagggagatggcaagacttaccgtaaactagctgaaaaggagacatacctataggagttttgaatgcagttcggtaagcccacagcgcatcatctagctttttagcccagtcttttcttgatgtttctacagttttctctaggattcttttcagttctcggtttgagatttctacctggccactcgtttgagggtgatatggggtagctaccttgtgcttgactccatatttagctaacaagctgttaaattgcttgttgcagaagtgagttcccccatcactgattatggcccttggcaccccaaagcgagtgaaaatgttcttcctcaagaatgacacgaccacttttgcatcattggtgggtagagccactacttcaacccatttagacacataatccacagcaaccaggatatattgattggagaatgatgtagggaaaggacccatgaaatcaatcccccacacatcaaataattcaacctcttggatgttgttcaatggcatctcatctctgcgagaaatattacctgttctttgacagctatcacactgcactacaaagtccttggcatccttgaaaagtgttggccaataatagccacattgcaagactttctgtgcagtcctatttgcaccaaaatgacctctataattagaggaatgacaatgccacagaatactcggcacttcggtttcagctacacatctgtggataacattgtcagtgcattgaaaatataagaaagggttatcccagaaataccttctcgcatcatgtaggaacttctttctctgctgccaattcaagtcatcaggaatgattccagcagctttaaagtttgccatgtttgcgaaccatggactgaattgtactgcaagcacttgctcatcaggaaaagactcattgatttctatttctggtccatcttgcaaatctttctcctgaattctagacaagtggtcagccaccttgttttctactccagccttgtctctgatttccagatcaaattcctgcaacaataacatccaacgcagcaagcgtggctttgcattctgtttgtttagcaagaatttaagagctgcatggtcagtgtaaacaataaccttagaacctactaaataggacctaaatttgtccaaagcatacactacaactagcatttctttttctgtggttgcatagttaacttgtgcctcatttaggattttgctagcatagtatataacatgtaaccgtttttccttcctctgacctaatactgcaccaactgcataagcactagcatcacacatgagttcaaaaggcaaactccaatcaggagctatcaaaataggtgcagtggtgagtttgtgcttcaaagtgttaaatgcttcaagacaggcttcattgaagcaaaattcagtttctttctccagtaattggctgagtggctttgagatcttggagaaatccttgataaatctcctgtagaaacctgcatgtcctaaaaagctgcgcacaccattcacattaataggaggaggtaatttttcaattagcaatagtttagctctatctacctctattcccatttcagagattttgtggcctagaacaataccttccctgacaatgaagtgacatttttgccaattcaagactaaatttgtttcttgacatctttttagaactttagctaaattagccaaacatgaagtaaaacaagagccaaaaacagaaaagtcatccataaatacctcaaggccattctctaccatatcagagaaaatggatagcatgcatctctggattgttgctggtgcattacaaagtccaaagggcattctgcgatatgcaaatactccaaagggacatgtaaaagctgtcttttcttggtcttctggtgctactgggatttgattgtacccagagtatccatctaagaagcagtagtagtcatgaccagccagcctttcaagcatttggtccatgaaagggagtggaaaatggtcttttctggttgcatcattaagcctcctataatccacacacattctccatccagtaatggttcttgaggggatcaagtcattgttgtcattttgaatgactgtcatgccccctttctttggaacggtttggactggacttacccaagctatgtctgaaataggataaatcataccggcatctagcagctcgacaacctcttttcttaccacttctttcattgtaggattgagtcgcctttgtggttgtcttactggtttaacatcactttccataagaattttatgagtacagaaggagggatttatacctttcaggtcagagatagaccagccaatgactgtcttgtgctccttgagtactttcagcagcttttcctcttcatgccattccagccctttgttgatgattattggatatatttctttctcacctaagaatacatacttcagatgctcaagtaattctttcagctccaccttaggtgctccagctggaatatcatcttcctttttctctagcacttccagcacaacttcagtattttctggtgtggattcttgttctgcaacatgaatttctgcagcaatttctgctgctgtgctttctgcttctgttgcattttcttctgtagtattttctgctgctattatctctgttgtcatacctgcacaaacaacattatccaacacatctagcctaaaacaatcatgttcatcagttggatgtttcatagcatcaagcacattaaagacaacagattcattatccattctaagttcaagtttgccctgctctacatcaattaaggccctagcagttgctaaaaacgaccttcctaacagtagagggatttcactttcaccctccatatctaagactatgaagtctgcagggaagatgaatttatctactttcactaaaacatcctcaatcaccctgatggtttccttaatgatcggtctgcaagttgcaaggaaactctagtgggttttaattcagagatacccagggacttacacattgataatggcattaaatttatgctagcccctaagtcacatagtgtcctccctacattgatatttcctatggctatagggatattgaagcttcctgggtctttcaattttggtggaagctttctctgaatgatggcactgcactcttcagtgagtgctatggtttcacaatcctgcagtttgtgttttttagacaaaagttctttcatgaattttgcatagttagacatattggctaatgcctcagcaaatggaatattaatgtgtaaacttcttaaacatatctgagaacctgacaaactgctgcttcaggatttgttgcttggtctgcactggatatgggggtttctcaaagcgagagaaacccattgcttctttggaggtgcggaatttttctccttggtattttctgtaactttttcttcttctgtggtagctgctgtattttctttttctgcttcttttctactcaccttaggcttttcttgtggaatgagtactttcccatttctggttgtaatagcctttgcatgttcccttgggtttatcactgtgtcactggggaactgacctggtggtctctcagctagctgttttgccagttgaccaatctggttttctagatttctaatggaagcatcttgatttgttctgtgagctctggtttcatttatgaaggcattggtagcctgaatgtgctcagttgtggttttggacagctgcaacactaccttttccagctccgacatctccttgttgggaatggctggaggctgtagatagttgttagatttgtaatcgaactcgcctccttggaattttctttgatagttgtttcccggagcaaagttgtgattcctctgatgttgctgctgctgtctctggtcattccagattccattaacctgcatagggtcagctccaacaagaataggacatacattagattcatgctcaccttggcagtactcacagctgatgcagggcatgctattggatgaaacttgagctgcagagacttgaagtttgtctattttttcagttaacttagccaactgttgggctaagattttctactctgcaagcatggcatcactgctggataattggataggttccctttttggctgaatcatgaggctttcattttcattacgagcaagggagttaatcagctcatatgtctgagctgcagtttttgaccttattgtaccccctgctgcaacattaacaatcatgcgtgactcaggagtcataccattaaagaaaatatgtacctgcttacccacaggcatgtcatattgtgggcatctcctgattaattcctggaatctatgccaggcagcacacagggtctctcttccattttgggtgaagttggtaatttcatttaccaacctgttgtatttgtccatggaaaagtattgagagaaaaatcttgagactagttcatcccaagtagtgatgctatttgatgtttgtctgttcaaccatctcagtgtatttcccttaacaacaaaagggaataagcttagtcttatagcatcatctgaaactccttggtgtctgatagtgtcacagattctcagaaatctgtcaataaaatcatgaaggtcttcaaagtcttccccaccaaactgactgtgttccaccaaagcaatcaatgaaggattaatgtcaaagtgatttgcttgtattggtggtctgacaatactggagtttggtcttgtgaacattggagccagaatatcctccattagttcatcctctggtcttggtcttggctgattattttgttcttcagccatctctacctctgactctaattcaggaattgaatcaaagtcaaagttttctgcttctctccttctctgtctagctagtctcctgttccttctaacagttctttctatctcaggatcatactgtagattcttaggattaactgaacctcgcataaactcagagaagcaattagtaacaaaaatttccaatcacaaagattaaaattactacaaaatcagttatatcaatccccggcaatggcgccgaaaacttgttgcgaaaacgacaagtataccgctcgtttcaagtaataaagtaggtaagtaaagtatcgtatccacagagattgatactgatttcacaataatttgcagtctaagcaattggaagggaaaagaaatgatttttgaaagaattgtttgttgtgttgagagttgagtgattaagtaaatgacataaattaaaaaggattaaaatgcaagtagaatgagttgtaaaccaatggacgaataattgtgattaggacgctatccccttttgatccctacctcttccacttgactgattatcgaagtcgattgcttctgattactcagagaataaatcttttctaatttagctaatccctaatcccttagcgaattaaccctttaacctgaataaaaaccctaatccctcagtgatttctatcaagttaagcatttaaaagaatatattataaagttttgcaatcacgcatccctatccctaggcaatgaacaatcgttatcttactcatgtcagaaattagaatcccaacatccctattgcgaatcctaaccctcagaacttagatagaatggccaattctaagaaagagtataacaaataagaacagagtaaaacaaagtaatcataacaatctcattcaataccagtcaaattacagaggagttcacattggttcttggcctaaccacaatacagaatttagcctgacatagttatcaaaaacaccgaagcatacatagaagacattattctgcagcaaaccctagctttgattctatgtaggagtgatttccaatggtattccaagctcttgaaggttgtaaaagatgattttcttcagcccagaggcccctttttataattaccttcagtatggtttaatttgggtaacaaagcaccttcttcctctgtattttcgagccagataatttaaatcaggaaacagaatctttatggcgccactggcgctcgcgctgatcgcgtgggctttgcggcttagtggcgctgttagcgtggcctttcacgctgatagtgtgacttgttcgagctgaatgactggtccctgcatgttgccacgctactcgcgctgactttcacactgatcgcgtgactgcttcgagttgaaaggttgacctttgcttatggcgcgactcgcgcggggtttggcgctactcgcgtggattattcgaactgaagcttggcagtttgtactgtggcgcgactcgcgcgggatctggtgcgatccgcgcgagaccttcagcttggttttcttcttctttttggcttaaatctcctccttttggccctgaaatcatgctttggaactgaatgagataaaattaactataaatgataaacttagcctattctgatctaattcctaatgatttaattgaattataacctaaaactagcctaaaactaagatgtgttagcaacacatcaattagccaaaatggtagttattacttggtcccttcccaaaacaataattgttgatgcaacgtaaaaggtacacattaactagaatgaatcgaatcccttcataacagaacaaaataggatggttttgcatccactatgaagaatgctaaatacatagtttttggtccaatcgtgatttcgactaccaaaactcccaacattgcagtaactcctgaagtgaaattggtcatcttcatatttatggggatcaaattctctcaccttttacaaattttccttaccatggttagaggaatgatgttaagaatagaaccatcattgtcaaaaacttttgccaatgttttaccatttatttaggttttaacatacaaagacttcaaattttttgccatctctagtgtaggtttgttgaacgtaatatcaattctttattaacatcctcatcaccaatagtagatcattcatgttcttcagaacaagcatctccatccaaactttcattttgataatagctagcccaaaattcactaggaattaagcttataacatttacttctgcacctagcaaatcatcatcattcaacctagcttccaatagcgagtcctttatttgtttcaattcttgttctattggctcctcttgagagatattttaagcaccatcttcttccctgtttgtttctaaaatcacattagctttcttgggttccatttcacccttctcagtcgattcggttggcatgtatttcattgaatcaactgaaattattgatttcttggttgcggctaatgaatgacttctaaaagcttgatgtaaatcaagagccacttgattcactgtagtttctgcttggcctctagctttaaggtccataatcatggctaaggtctgcttaattttattcacaaccttggtctcctgccacttcctttttcgagtacgtgttaatcctccaagttgcacatttgacttgctttggaccacctttcgatacacacactattttcttacttccagttttgcatatgacttaatcgttacggatagaccttttttctcattgttaacagtgattcgtaaatttttcattccatttttgacattgaactcaaccaccttcttttgtttaggggaacaaggctatcatcaatctatggcactttaaccacttacatataacaatgcatccactgtcttagttcatcaaatttcatggattcttttttccttctcatagcttgtcgcatatagattagattgggactagtaattcgatatatggatccattagaagtttcttctatttgggtccaatctgcaaacacactttagcgaatctagtgaggcactcatataacccttgttgcctgtggggactataacctttcaaatactgaagtcctcttaatggatctttaagtttattgctttccttctgttttcgtctaccaaacccgcttcatcttcttccctttattagtaggttgctcataacaggccatattaatgtctaactttggcaaatggttcatatctactgccattttcggctgcacctttattggctagctttttctttggtaggccatattgtatatatatatatatatatatatatatatatatataaaataagagataacatgtatattcccacccccctaacatataaggtgtacaagatacaacaacctaaccattgatgctaacagcatgatcgcagatgcaatccccatcaatcacttagattcctaatgcaggcttctagacatatacagtattcaacatatgagtaattaaacgattttatataatgatgcaaccaagtttagattttgaatatgatcatatcaaaaatttctttaaatgttaaactccttccacaaaatatcagcttattccacttattccataaagaccaaataattgctacccaatccacctcctgggcttttgatcccttcttgccatagacaaaaaaaccaagctgccaatataatgactccaaggaatttggcattactgattgaatacccaaccaattgtaaaaaatttccatattcttatcgacatataacatgtaacaaacaagtgatcaacagactcttccacacatccacactacgggcataaaaaattacctagcagattgatatttgtcttgcggagattagatcttgtaggtaatctatcgtgagttgccctccaaatcataattagcatagaaggaggggccttgatcttccaaatgttggagaaaaaatctttgttttccataatattctgatcctgcatgaaattagatcttttttgctggctagcttaaaatgacctccgttgaaatccctttgtacaacttgccgaaatacaatgcaattagtcataaaattgttgtaggaattgtgccacttacaatatttttttcccttccaattcgtctagagatggtatcttatgtctatccttcagctgaatttgctggtattttattagatgacaaaaaatctgatccgcctttgtcaaagtcatacttaaactttccatcctcagcatcacctttgttttttcctatttcaatgctggtcatgaataaggtttcccctatcagatctcaagaaccatgatataatcttcctcttgaaaggtttcaacattcttatcatcaatgttaactaatgagatcaaatgggatcatcgtcctttattagccctactcagttcattctcatgtataaattgttctattcagttagctttagaggctaactaactgaggtcaccatattcttggactactagttttcttctagttgtggatgcatattactagatgtcgtagacacatactacacttttggtaattgtattgaacaatggcttccagccttcctggacctttctatgaagtctattgtcgattcgccaactatttgcctcatgttcatcaaatcgacaatagttacttcaggttcagacctgtaaaatttgtcatggaaacatctttccatgtttgcctagttttgtactgaattcgacaaaaaatttgagtaccaagtaaaggatattcccgtcagagacaaaggaaaaagctgaaacttatgaaactcgttctgactagcttcaccactgtaggttgtgaatcaccctgtgtgttccatagaaaatttctcatattcacctaaaaaagtagagaaatctagtgtcgtgtaccctttcggcaaaggcatcatacggtccacccattctagatatgacttcttatacatgggtctctccgttggttttaattgaatgataaaatacttctacatagtttaggctatcaattctagatcaatcaaaggcatcgtggtagttttcagtggttgataattgattttccccacaacacttggccccaatcttgcatcattcatgacttgattagctccccttaaaagaggtacaaaaggagttaggtgaggtaagccattttggccaacaacatttgctggtcttttggctagccctacctgtgctggaaaaacttggtaagtataaccatttgcatgtgctttccccctaaaggtagcggagaacaaattactaacattaccagacatataactcgtttggctactaaaggtttagggataaacccatttggctacctattggctagattgtattaaacccctcatgtcaaagccatatccatcttagttggttgccatgtgggcataaatgccaaatttggatgggccaatggtattaatcctgcatgaattggcctaatcagatgtggagaatcgagaataattacctaattcaacactgggctttttcaaacttcatgttcataactgcttttatcccttattccattgcttcaactttagttagaatcctgcttgcatatatcttcaagacatttgataaaaaaaattgaattttcaaatgaattggttgaattatccatccaatatctatatataatcctttatttgaagtaacaaacaaccccattcagctatggttctaaatttattcatttggctaactaactctttattcaaaatattttgaatggtaaaaggacattactaactcattttcacacatatggatggtttctcaaagcaagattatcatccataaaagtcatacaatatctttcattatcaacacattcacctcatcaaataatatctatatagattcaattcatcattcatctcactcaccaatcaggagctcttacctaattcattaaaatcataagaatttttaaatatcaagttctcatactcacattcccatatgaatgtcaattatatgataataacaagaatccaattcaattacataattaaaagtatatcatactacaatcagtacgacatatacatatatcattactttgacaattagcatctatcaatcttcatattcatatatttacccaaacataacataaccatcttctattagttcataaaacaagttaatcgccttcgggttccatttgaataatcatatttaaatatgtaatagaaaactaactcacttcagtttcatgcttaggccccaaaatacttgtgcttcaacctcacacttaagtgtctaagtacttatgtttaagccccatgctttagccctgcaatacttgtgcttaagccctgtacctaagtcccaaaatatttgtgtttaagccccgcgcctaagctccaaattactcgtgcttaagcttaaggtttgcaacttttagtgaacttcgaaaatcactccattgttattcgaaatggcactcaatgcttcaataattttgaaaacacatagtttataacatccaaagccagagatcaacatttaaatcatcaaagacaacataaaacaagaatttaagcttcctttacctctatagaatcaaaaagagagatttgtgaagaaggcggaaaaaaggataaactttgtgtccaagatgatatgttgtctaccattccacaacaactacaacacaaggtatgacccatgacccaaaagcacaaagaaaccccaagtaagaacctaaatcaagctttctaatgagtgttccgtgaggaaaacaaaaaatggaagcaaagggggaagaagaaaggtttttaccgcactaagaacaacccaaagaacaacaaaggaacttccttttacacaaggaggaccaaagctcaagctcctaagaggatgcttctcttggagaaggagaaaaaaagtaaataatgatactttgatttgagtttcagatttccaaaggatttgtgagcgttttatcactctttaatttccttctcttcacactttttacacttcactaaactcaccacccctttccaatcactcaaggcccactcacctaggcccaaatactctaaaaatcaactaatcacacataaaatatggtttaagtataaacataaacatgaagatagatataaacaacacaaaccattacgtcatgattaattaattaattacaacacttaaatttaacaagttataattgggtgaaatgaagggaaagaataagaaatagatgttgacgttggaaagaatagatggaatggttgaagagagaagcgggttagcctaatgacaaataatacctaaaataatttttttaaaaaataaatgtgagagcctaattaaaataatttaattatggcattcaatataagttttgaaagaatatatatgacatcacactactatatatgtaacattttagtaaaatgtttctaaaaactttttgtaacatttaaaaaatattgccaaatatgaataaatgttattaatatgttacatatgaactatatacaacatttgataaaatatctcaaaaagtcattaataacatttattcatattaatgatattttttaaatattatcaaaagtttttagcaacatttttactaagtgttagaccaaaaaatgatgctaaagatcatatatgtagtaatatatatgatcatatgagctatacataatatttgataaaatatcacgaaaacatattaataacatttttactaagtgttaaaaaaatattgttaaacatgaaatatgttaatgtcacatcttaattttgttaaaactcaattcatattatatgttagaacaaaaaaatattgttaaacatgaaatatgttaatgtcacatcttaattttgttaaaactcaattcatattatatgttagaacagaggcttgtatcacagaggaaaaacttattactcatatcactgcagaatgaattacaaaagcactcttttatagagtttcacataaagccatatatagctaaaacaattattaactaactaactaaattaactatctcaacactcttccttaattcagttctacaacattcattattcctaaatcattcctaagccttaaaaagctatccttcttcaatggtttggtcagaatatcagcaacttggtctgctgatctgcaaaattccagcttcagcttgcctttgctaacttggtctctaagaaaatgaaaccttgtttccatgtgtttacttcttccatgtgcaatgggatgtttggccaggtttattgctgatttgttgtccacaaacagcttcaccattccttcttttctaatttgcatttccttcaacactgaatcaatccaaattgcttgacatgcactcatagatgctgccacatattcagcttcacatgaagacaaagctacaatgggttccttctttgaacaccaagcttgaaaatgtaacctgctgtgctttttctatcattcttgtctccacaccaatcagcatatgagtatcccactaattcaactttctcctcttccattctgcttggaaacaacaagccatattccagagttcctcttacatacctcatgatcctctttgcagctaagagatgaggaactctaggatttactatgtatctactgatcaagccaacactataagcaatatctggtctagtgttgcaaagatacctcaatgagtcaaccatctgcctgaattgagttgaatcaacaacatcctcccttccatctttttctaatactaatctagtttcagctggtgtagctgctggattgcatctgtccatcttgaatcttcttagagaatcacttgcatactttccttgatgcatgacatatccatttttcaccttcttgaactagattcccagaaaatatgacaattctcccaaatctgtcatctcaaactctttcatcatgctttgtttgaatgaacagatttcatgctcactcttacctgtcaccaacagatcatctacatacaagcaaacaattagtagacttgatctttctcccttcacatagactccaaaatcagaactgcatttcataaatccaatctgctgcaaaaatccatctatcctcttattccaggctcttggagcctgctttaagccatacaaagccttctttaatctgtagactttgtcttcttctcctatcacaacaaaaccaggtggtcgtgcgatgtgttgcaaacacatcttgtttttagtataattttaggatagattttaattaaatatgtaggaaatataatagaattaggttagtttagtactttaattgccttgagctaatttcaataccacttaagcattttgcaggcaaaaaggaggaaattcaagcaaatgaagaagaaaaccaagtctgcagtcccgcgctattagcgcgggatctcacgctatcagcgctagatgcagggaatgaaggctttggtctcgaatgattcacgctattagcgtgacatccacgccatcagcgtgagagaagcctggatcaagcctgaagactcgaagacctcacgctagtagcgccgccctttcgaaagacccacgcgattagcgtgggattgcgcgctgatcgcgtggcattgattttgtttccttaattaagaagattgactgcgaaattggcaaaagataaaggtctagttactctaattaaaccattctataaataaaggcctctggggactgcagaatctatctctcggaccaaccaacaaccttctatcatctatttcactctttctttctcatcttttcaccattggaagtcaagaatcaaggcaaggtcacttaagaatgtattatttgacagcttttggtttcttgaagcctatggcaggctgaatttgtattgtgggaaggccatgaactgatgtaactcctctgtaacttgaattggtattgaactttaatgttgttttgattattttattctactctgtgctattcaatgttttattcttaattagaattggctattctatttaagtattgagggttaggattcgcaatgggaacgttggggttctaatttctgacatgtttagaatactagtcattcttcacctaggaatagggatgcgtggctacagattttataatatgatcttttgcatgcttaacttgatagaattcaccaaggaattgggtttttgaattaggttaaagggttaatttactaaggaattagggattaactagtttaggaaagacttatcctccgagtaatcttaacaagatcacatgagatatattctttgaatacttagtttgacagaatcactaagggtttaggtttctctatcaaattaaagggctaaatcgctggttgtgctctaggatttacgaatttaggaaagatttatcatgtgtgtgacttaagataataaaccaatcaagtaaaggaggtaggaacaaaggggattgcacctgaccacaattgtttcttccattggtaacttcttttatatttctactgcattttctattttgattcaaacacaaatcaaaccaacaactctttattatttctatttttaattccaatgatttagaattaatattattgtaaaaattaccccaatccctgtggagacgataactcacttactcacttttattacttgttaacgatcggtgcacttgtcgtaacctcacaacaagtttttggtgccgttgccggggattggttaacggatttttacagtaatttttaatctttgtgattggaattttttgttactaatcgcttctctgagttttatgcgaggttcagttaaccctgaggatttacagttcaatcctgaaattgaaagaatattccgaaggagactagccaaacaaaggagaagagaagctgaatattttgactttgattcaattccagaattagagtcagagatagagatggctgaagaacaacataatcagccaaggatgagacctgaagatgaacttatggaggatattctggctcctatgttcacaaggcctaacttcagtattgtgaggccaccaattcaagctaaccattttgatattaatccttcattgatagctttggtggaacgcagccaatttggaggagaagactctgaagaccctcatgacttcatagatagatttctaagaatatgtgacactatcagacaccaaggggtctcagatgatgcgataagactaagtttgttcccatttgctgtaagaggtaatgcattaaggtggctgaaccgtcagacatcaaatagcatatcaacttgggaggatttggtctctagattttttgctgagtatttttcaatggataaatataaccgtttggtgaatgagatcaccaattttactcagaatggaagagaatccctttgcactgcttggaatagattccaagaattaatcaggagatgtccacaatatgatatgcctgtaggtaagcaggtacgtattttctttaatggtataactcctgatactcgtatgattattaatgttgcagcagggggaacaataagatcaaaaactgcaactcaaacttatgagctaattaaatctttggcttgtactgaaaacgaaagcatcaccattcagccaaagagagaaccaatacaattgtgcagcaatgatgctatgcttgcagagcagaagattttagcccaacagttggctaagctgaatgaaaaaattgatagacttcaagtctctgccacacaagttccagccagcaaaccgcgggttatttgtgagtattgccaaggtgagcacgaaactaatcaatgttccgttcttgttggtgctgaccctgtgcaggtgaatggagtttggaatgatcagagacaacagcagccacagcagaaaaattacaatttcactacaggaaacaattatcaaaggaattttcaaggaggaggactagactacaagtctaataattacctgcaaccccctcctattccaaccaccagtatttctgaacttgagaaggtagtgttgcagctgtcacaaacaacttcagaatttatccaagagaccagagctcaccatagaaaccaagatgcctccatccggaatcttgagattcaaattggtcaattggcaaagcaagttgcagaaaggccacaaggacaattcccaattaccacagagacaaacccaagggaacatgtcaatgctcccaccaccaggagtggaaaagtgctgtctacaccagaaaaaccggaaaccagtaaaaatgaagttgaaaaatcagcaacagctgagacaaatggggaaaaagctgcagaaaattcagaggaacaaaaatctgcacctcagcctaagaagtgggacttctctcgctttgaaaaacccccatatccggtgctaaccaagcagcaaatccaacaacagcagtttgccaggttcttagacatgtttaaaaagttgcatataaatattccatttgctgaagcattaactaatatgcctcattatgcaaaattcatgaaacaaattttgtctaagaaacataagttaaaggaaggtggaaccataaaactcaccgaggagtgtagtgccattattttaagaaaacttccaaagaaattgaaagaccctggaagctttaatatcccggtatcaataggaaatataaatataggaaaggcactttgtgatttaggagctagtataaacttaatgccattatcaatgtgtaagtccctaggtataactgaattaaaatccactggagtttccttgcaattagcagatagatcattaagaagaccatcaggaataattgaagatgtgttaataaaagtggataaatttatcttccctgcagattttgtggttttggatatggagggtgaaagtgaaatccctctaattttaggaagatcatttttagcaactgctagggccttgattgatgtggaacaaggaaagttagaattaaggatggctgatgagttcgttattttcaatgttttcaattctgaaattaatccatctaatagttataattgttctaggcttgatttgttggataacatgaattgtgcaagtgtaacagcattaggtgcagaaactgcagtggaaaatattgcagaagaaaactcaacacatgcaaaaattgctgcagaaaatttgacagccgcacacatcccagcaacttcaactcaggtagaagagaatactgcagtaaaagaagcaaggacaggaatggcagcattagaaattgctgaaaaatgcagcagtgctcataaagaaaaaccaacagaacatgtgctggagaaaaggcaagataacgatccaattgaagcacaaaaaggtaagctgaaagcaattccaaccaaagctatagaattgcaagttgcaaataaacatgtgactgaaaaagaaaaatctcaaatcaagaaaaagaagactaagaagaagcataacaaaaagaaggaacttgagccagggacaaaggtaatgctagcaacatatcgcatgatatttccaggtaagagagcattttgttggtccgagccattcatcattcaaaagatttgctcatttggattcatagaaatcatgcctgtagacaaagggaaaccgtttaaagttgctaaatgccggctgaaacctcacatttaaaaccaagtggataatgctaaaactcttaatccacttaaatccactaatgattaaaaagcatgatgcgtctagctaagatgttaaacaagcaacctatattgtatatacatggtattttaaatttatgtttagaccatgagcagtagatttaagaatttgcattacttgttttctgcattaagtcataataatacttaggttagtgcattttaacttttattcatagtagaatttgtcattttattgttacatgcatacagtaggcaaccattgagtccaagcatagagagttaaagcattaaacaagaaaattatgcagaggatgtggcgctactcgcgccagtactcttgctaacagcgccatagattcgattaagtcacgcgaatagtgtggaaaccgtgctagtagcgcgagatactcgagcctcagacctatttctgcataatttcaccctaaactgcgtgaatagtggcgctagtagcgtcaacaattcgagtcaaaaaaccaattttcccactttccacgctactggcgtggtacccagcgctggtagcatcgattatttgagactttaggggcctccaggggttatccacgccaatagcgtgagatcccacgctattagcgtgagttattcgaagcaaaagacttttcagtgcataatggcgctattagcgtcgcactccacgctactagcgtgagtttgcagaaaccgtttttaaattaaaactcttcctctcgcgcctcactctctccctctccctcattttcgcccaaatcccctcactcccattaaccctccataactgctgactctgaatgttgttttaaaattgaatttattaggcttgaatttaattgagtatgttaaaagcctaaatctgggaatgagaagttcatcttctaaatatgcttaagttattgaattaaatgaactagacttacatgaaataattgaactttgaaattttggtggtgcatgcaagaacccaaatctgggaattgttgctaggcatatccaaaggctatatgatttattttgtggttcttagtatattaatctgatatatgcttacatttaaatctgggaattcacattggtaagccttgctaaatgctaaattttttagttgtagcttggcttgcatttgttaaactaaaattgcaggtgtctaagacctgtttggggtttgtttataactgattgttagtactgcaatacagaaccccaagtgaataacaaacaactgattatgtgaaagtatgtaatgctttaaaactgggaatcataggcactgcgaaattctgagcagtaaatgttaaaataattgcacacataattgctgtttttaccaactgtgctgttatatgtttgaatattattcactaatgcacagtttatgagttggttgttgtctggagttacaatacaaggactaaatctgggaatccaaaccaatgcagcagaaggtttattggaattttctgcaaataaagaattggaagaaaccagccagcaaatgcagtactactgcatactgcaaaatgacaacaccaggattattaaattttgttttactgtttctgtttttaaatttcagtatatttttagtttaactgttttagtagttatttgctttgaataaattctgttcagtttaaatgtgattctcaaatactgcatgtttgattagacaacatatgatatttttcaattattgctgaggacagcaatttcctaaatctgggaatggtacacatgcagtattcgttgaatcacattcaagaatgatagaaaatttttgttttaatcagtagtttaaattcaataaagtaggcagcacatcaaatttttcagactaaaaagtgaatgaacacagtatggataggaatcctctgataaaagcttgtgtgagatgaaatatagcatgaattgcataatacctgattggtttttgattgattggtatatgatatgcatgttaaagttgaaacgttgcttgaaatgaagtcaattagtgattaacttgagacaatacctgtgagatttttgagccaaaacagtaattatttttcttcttgagagactccattttcttagtactctagaacttgaattgtttctctggatgcatgtataaattgacatgattaaggcaatttcttcttcttaaacccagggccaaattaacttaccttcaattattattccatttgcacctaattttaagctttagccgttcaattctgctacctaaatcagagctatgtccatttaccaacctccctgaggctagagaaggtaaattaagttcatgacagcaaaaaacagggaagtgttcatcaaggcatcaaggaaaacaaagtaaattcgattggtatgaaagaaaaagaagaaatatgcagcaggccagttgagaaatattatgcctgaaattataagctgaaaagtttgaaggttgctgtataatgaaaagaaaagaaaaatcacaaagaaagtttattgttttattttagctattataaagaataaatgttgaataaagtaccagattttgaagaagatgaacaaggaagatgaaagaccacaggattggacttaagggactggatctagcctcatattagctacttatccaaagatttttcctacccttagcccagccaagttacaagcctaaaagaccttttgaactaattatgcttgcatctgttgagaatattttcaagcctacgatagtgctttgattatgtttgagtgagagattgattaacttaatacacttgagtgcatgagtgcatacacacatttctgtgaggaatactcaagtcatctcattcattgatgaatttgaaaggaccatagaagctttaatataacttgattatactcagcatgataattctaggattgtaaattgtggttcatgtttgattgttgatccttgtttttatcttagagttctgtctgttgctgaggacagcaactaataaatctgggaattgtttgatgtgttgcaaacacatcttgtttttagtataattttaggatagattttaattaaatatgcaggaaatagatagaattaggttagtttattactttaattgccttgagctaatttcaataccacttaagcattttgcaggcaaaaaggaggaaattcaagcaaactcacgctatcagcgccagatgcagggaatgaaggctttggtctcgaatgattcacgctattagcttgacatccacgccatcagcgtgagagaagcctggatcaagcctgaagactcgaagacctcatgctattagcatgaggatccacgctagtagcgccgccctttcgaaagacccacacgattagcgtgggatcgcgcgctgatcgcgtggcattgattttgtttccttaattaagaagattgactgcgaaattggcaaaagataaaggtctagttactctaattaaaccattctataaataaaggcctctggggactgcagaatctatctctcggaccaaccaacaaccttctatcatctatttcactctttctttctcatcttttcaccattggaagtcaagaatcaaggcaaggtcactcaagaatgtattatttgacagcttttggtttcttgaagcctatggcaggctgaatttgtattgtgggaaggccatgaactgatgtaactcctctgtaacttgaattggtattgaactttaatgctgttttgattattttattctactctgtgctattcaatgttttattcttaattagaactggccattctatttaagtattgagggttaggattcgcaatgggaacgttggggttctaatttctgacatgtttagaatactagtcattcttcacctaggaatagggatgcgtggctacagattttataatatgatcttttgcatgcttaacttgatagaattcaccaaggaattgggtttttgaattaggttaaagggttaatttactaaggaattagggattaactagtttaggaaagacttatcctccgagtaatcttaacaagatcacatgagatatattctttgaatacttagtttgacagaatcactaagggtttaggtttctcgatcaaattaaagggctaaatcgctggttgtgctctaggatttacgaatttaggaaagatttatcatgtgtgtgacttaagataataaaccaatcaagtaaaggaggtaggaacaaaggggattgcacctgaccacaattgtttcttccattggtaacttcttttatatttctactgcattttctattttgattcaaacacaaatcaaaccaacaactctttattatttctgttgttacttccaatcatttagaattaatattattgtaaaaattaccccaatccctgtggagacgataactcacttactcacttttattacttgttaacgatcggtgcacttgccgtaacctcacaacatcgtgtcacatacacttcctcttcaagtgaaccattcaagaaagcagcctttacatccatttgatgcattttccaatccctttgacttgctattgcaactaccagtcttatagtttctaatctggccacaggtgcaaatacttcttcataatctataccggctttctacaagaagcctctagcaactaatctagctttgtgcttaaccacttctcctcttggattcactttcaccttatacacccacttcacacttataggtttcttatgaataggtaaatccaccagttcccaggtctcatttctctcaattgactgaagttcatctttcatagcacaaatccagcttggatcctgcaaggcctggtccacactcattggttcagcttctgatagtaatgcaaagtgtattaaatcactttctgcattcacttgtgtatcagacacaatatcaaaatcttgcatcctttgtggaatgttcctagttctctgtgatcttctcacttctgcatctgtttccatatctcctttttcttgttcttttggctcaaaatcaaacataattctgcttggtctgtcatcattctctcagttccagcttttagactcatctatgaccacatctctgcttatgatcatttgcttcttctttggatcaaatagcttgtaacctccagtggcatgatacccaacaagtattagtttctctcccttgtcatctagtttctgccttagctgatcaggtatatgcctgaaacatactgagccaaaaactctcaaatgactcacatttggcttgcaacctgtccatgcctcttctggtgtaatacccctcaagcttttggttggacatctattaaaaatgtaagctgcagtacacattgcttctccccacaaaaactttggcagattcttactcttaagcatgcttttcaccatgttcatgagagttctattctttctctcagtagcaccattatgctggggtgtgtatggtggtgtgatctcatgtacaataccttcttgatcacaaaaatgctgaaaaatagataaagtatattcacctcctccatctgttctaagaatcttcaagcaatggccagactatttttctaccagcactttgaatttcttaaaagtttcaaacacatcactcttcctagcaatcatatacacccaaatcttcctggtaaagtcatctacggaggacacaaaatacctgtttcctccatgagattttgtttgcattggtccacatacatctgaatagataacttccagtttttcttttgtcctgcttggaacttgatttttaaatgagcaccttggctgctttgactccaaacactcttcacacatctcctttggcacatgaatctgaggtataccattcaccattttgtataacagatgtagatccctaaaatttaggtgcctaaacctgtagtgccataaccatccttctatttttactgaagtttcaaagaagttatgctccatcacttgaattcccaccttaaaggttctattgctggataaaggtgccctgataattagtcttttatttccatcaaacactttcagttctttgttttccacatgaacatcacataacccttctcaagtaattgcccaagactaagcaaattacttttaatccctggcaccaaaagaacatcagagatgaaggagtgcttgccatattttctcttgatcagcactttaccaacaccttcagctgtgagtgtgctattatcagcaaacttgatcttgcttttcacaattgagtcaagattcacaaaccaatctcttctccctgtcatatgagtggaacaaccagtatccaaataccagaaatcaatattggattctctttcttcagtggttgtcataagcatgacttgatctgaatcatcttactcttcttctacaagttagacccacatcaacacactaatgaagaatgaacaaggctttataattcttctttttgatttctttggcatgagcttcatccacctttgctgtagtgatattttcgataccctctgtaatcacttcaagcacatcttgaaaaccaagaatggcttccatttgattgcttcacttatcctaattctttccatcaagaatgggtaatgttgctggaaaaccaccattattggaggtggccatcttcaacaactcactcttctcacgtagcagaattcactctcttctcacacagccgtatacacacacttctcacacagcggaattttttcctctttttctctaccaagaacccaaagctctggataccaattgttagaacagaggcttgtatcacagaggaaaaacttattactcatatcactacagaatgaattacaaaagcactcttttatagagtttcacataaagccatataaaactaaaacaattattaactaactaactgaattaactatctcaacattatatattatttctgaaaatgattttgacgagttaaattatgagaaaatgttatattagtattacacatataattctactaattatattaaccaattttttcaaagtgtgtgaattaattaaaataaatcttatatttgaggagaaaaataatatatagatatttatatatgtcattctgttaacgtcgattttttattttatattttacagtttatatcattttatatcttcagtatcatatgtatatttaatttctttttgtcttatcactctctttttctctttaaattaattgaacttaatctgcacctaactttttccaaagttaaaaggttgcaccgagctatttataaattcgataatcagtaaatgcatgtttttatattagcaaatgagtatttccatgtctagattaatgctccgtatgatacgtaattttcacatatatttttctaaaatggacgtggtatttagacttttagaagtgtttcaaaacacgctatataaactacatttgtttcttttttttttcattttttcttgttctttaaaatgacgaatatattcctaatgtgtttgtaaacatgatttaataggcaccacgtatacaatgctgtgacataatcaaaggaaccgatgaagcgagcaatgtggtcgaaattgtgatcagaggttgtcatcaatttgagagtgtgactcctctttagaataagttcgttttgggaacagatgatggagtatgcatggcgtttacactttaccctgctccgtatttacatgctgatatgcgactagcatataaggttttccaagctttttagaccaagaactgagcattaagcatggataattgccctagttttgtcatgatttgagctaatgtgatgaattgacaggaaagcatccacaagtgtcaagactacgccaaaaaccagaagaaaaagagctaagtctgaagaatctatggcgccatcagcgccgttgtggcgcctatggcgccacaagcactggaacctggcgccaatctcgtgcctcaagccttaacagctctggaagttggtgccaagagcaccaaggctgcgcctggggcgccatagtttctgtcagccagtgcctgaggcgctgcattcgcgccagcagcgccatacattctggaagctggcgcttggagcgccatactcgcgccaaaggcgccacaggtcgacagaagcaacatcttaagggcaaaacagggacttcacaagctccactataaatacttcaaccctcagcattgaatgcacgattttggagggagaaaaacaaaaaaatagggttttagaagcttggggtgccttagttaggggttttagggagttgaaggccaagtggggttgcttctccatcttcttcttccttgcttcagctaggtatgccattttgttttgtaacacagccacccattatgaggcttggctagttcttcattgtagttagggctaagcactgaatgtaacctcttttgggattgtattgaatgctatctttcattaatatcaagttatttcgctttatcttgttgaatgcatgtttctatctctctggaactgatcactctagtaaggtattaagagctggggtttacaatagggatatttgtaacgccccattcaatcttcagggtcattaccaaacattaatcaacaattatatatataatcatcagagttttaagcagtttggaagcataaactaagagtgacatcatcaactgtcatcaatgtaaccactgtacactataatatggtgaatatacacaaactctgtttaggtacaaaactgtacatatatctcccctcagggtacaacaaaaccaaaccaaaggcaaaatacaaaaatatcagagccacatgctcatgtcatctaagcctaaggtttataagcagcaactatccttgcataggcttcttgccttgggatctatctgctcctcccgaggaatcacctgcaaaacataagccccacacaaggggtgagatataaaatcccagtaaactcagggcccttgaaggtatttccttcccctggttcactttcaggcatatacatagaaataatatatttcaaccagccatcatcagattcaataccagaacatttctcaatcattcatcaggcaagcagggatctcatacccccttcattaaacatccttacactactattcggcagaggctacatctatgtatataggaacatctccacccagggacgctacctctatatactacgaacatctcatgcttggatctcatatatctatcagaggcttcatctgtatatataggaacatctcaatcaagaggctacatctatataataggcacatctctttctaatgaggctacatctgtgtatataggaacatctctactcaagaggctacatctatatatcacaggcacatctcatcatctatatcaacaccattgcctgaggaggctacctctgtgcatataggaacatctccattcgggaggctacatctatatcacaggaacatctcttaacaggtctttctcaatctcacgtcatctatcctactaccatagaattcaattcatacacagaattcacattcaaatctcatattcaaccaagcatgtcctaagtcaaacagttcatagccatgcacatcaattccccatcacagggtccagcttacatttcagcatctcagatcaatacacatcagttcccatcacagggtacagaatacaatccatcaatcaatcacatcaatatacaatttccatatacatgcatttactcacatcagaaccatcatcccatttggtgcatggtggaacacagcaaaggacacacatacaagaaccaagagcttacctgctctaggcaaaacaccggctctctcggcctcgtggtcaccaccactagaactatcgagttcacgtcctacatagtaacaaacatataacttatcaaatacggttccaagccgttagaacgaaaggaaattataatcctttctgcataacacacactcaatcacttcacaagtgattctcagaccctcaaaaggatcctacccagcctaaccaagtctacagagcctctcccaagactctgctcaggctaacataaggtacctccttgctttagccttctcaatttcaagcttcccaatacaaccaattcaattcataaacaacatctataccatctcttgagcaactttatcaactgctctaaggttcacaataaccaaataaccagtcttttctctactcatacataaactcagagccaaaatcaaacttcatcaataatgattactgaaggctctaacttcattaaaacaaccccctgaacacaattctctacagggcccaaacctaataacagctctaacacctccaaagacacctctcaagatactcaaaatccaccaaaaatccaatacacagaaccaacagctagagctcgagtttcttacctctaagaagtcaaggaagatcaggtaatcacttttcccaagataaatcgatcatgcacagcttccttcaaccttgggtttcaagctctcaaaggttctctcagagaaacacgatctcgccatttaccgcctcgtgtcgagaataaagctgggtctctagcttatctcgaggctctgaacactttctcagttgggtcagaggtgtttagatacgaagctctgaacactttctcagttggcttctccttctctctccctctcttttctttctcaatttccattcaaaatcagcttttataaaactgacccaaaagtcccgcgcggatcgcgccgctcccacgcggatcgcgccatcagttcaaaattactactctgactcgtgcccttcacacgattagcgccatatccacgttgatcgcgccatcctttcgaacctcccgcgcggtcagcgccacatccacgtgaacaacgccactattcgaaccatccacacggttatcgccggaaccacgctgatcgcgtgagatggccgaaggcatagctctgattcaggcctcccgcgcggatcacgccacaccccacgcggatcgcgcgagatggctgaatctacctctaaactcttctctcaagcttctcgtggaacccaaagcatggttattatccctaatcactaggcttaatcccatgcttaaaattcaaggtattacaatattgggctctaagcttggacttaggtaatgtgacaagctttacattaactagggataggagtgtatgcttgcaaccattcaatgcatcatttaatgcttgacttaaccaatatcactaagggattagggtattagagtgggaaaaagggttaagaacactacgggagtagggcttagctactattattgaagatgcatgttaggtaatttgggcttgatgaaggtagtagttaatacatgaacaagggtaggaagcatttggtgtggattgccctagctacttaaccacatatcttattatcaacctccatagtttgtctatacgcttatgtttatatttagctcttagtttagcttattcctcacacacacacaaaaacaacttcattcattctttatttgttatccaacttatcaatttaatttatgatttaattggtcaaacaatcctcatgggacgataactctctcttatcactttattacttgagcgaccggtgcacttgccgagtacgcaacacatgctatacaatttcaaagttcatgcgcatataggagtcgcttttatgtgaatacaaatactttagtacttcagaagaaaatagtaatagaaactagtacataaaccaagacattgtagacttgtagtctaggaaaaaataattatgcttagacaaatatttttcatggccatatagccctttttttattggaaaaaatcataagtatccttcacttcactgtatgacgctaaagttctcctccaatcataaatatccttcactttactatatgacgctaaagttctccttcaaatatttaagcaattacatatttagaatttgaatttcatatttttgattaagccaaaacattcttatagagtcctttgcaaaatgttaacgacaaaagaatgaatagttacatctgtctatgcagaatgccattacaacgcagtttttcaactgtgatgatgtctttttacataacatccaacaagctcaaatatcaatgcttggagctgttatagcacatatacttgcacttgcttttaattttagtttacgtttttgcaagttttacttacgcacacaaactgtttgataaaattcccctctcattgttattcataaattgaagctagaaccatattgattgtgtctctgagttgacctaggttaatcctgtgctacagaattaacgtagttaaattgttttggtgcgtgtcaacaacgtgatatcaaaattggcgctattgtcggggacacggttcattgtgtgctagctttaacttgttgtaaatagttcatagtagtagttatatatataaaaaaaaatttgcatacattcactgcatattgacattttgttgcacaattgcattttgtcacatatttgcattattgctgctgtgcattatgaagtatgaatgatgtagtttatgtgtgctgtaaaaaaaacagagaaaacagtgaaaaaacagagcaaaaaacagagtagtagtagagagaaagtagtgtagtgtagttgtttttgtagtgtcattttactgtcccaaaatttttccaacttgtgcagtttgagttgcgatttgtttcccaaggtttatcccccattttaaacaaaagcaaccccattaagggttgagtgtgggttcaaattggcaaattcgaactctaagtaggagttttggaccagtttttacaattggcgtaggagtattctgataatttcacagcaaactatctcagaattggctgaaattttactagaaggtgcagaaaattcatacatcaagttgaacttgttctgaagtaacatgttcatcaggggtccaaatcgccaaattccatcgtttaagccatttttgatgtgattttctaatttcatgatttttaaaaatcaccaaaaaaattacaaaaatcaatcatgatttttagacattcactgttatttttttagattttttcaaaaatttttagggcagttttccaatttctatttcatttcagcatatatagttggtagtgtcttggtagcataactgtttgatatttctgtgttgtttgtgtttattattccttatgagctgaactgtgtatgactaggtccacatcaagtgaattacattcatttgatcctgaaatagataggacaattcacatattaaatagacagaaccttaggttagatgacttagatgactttgatagtgtagttttagacagtagtgtagtatcttctgactttgattctgaatctacttctactccttctacttctacacatcttgatatcatggctgataacaacctaactcttaaggagttagctacacctgatgttgtttaccaaccttggtgtattcaataccctgaaactgaggtcagttatgagctgaaatctggcctgatccatttgctccctaagtttcatggacttgctagtgaagatccacataaacaccttaaggagtttcatgtggtgtgttccaccatgcgaccacatgatgttcatgaggattatgttaagatgaaggcattccctttctctctggatggtgttgctaaggattggttgtaccttcaaccagatcctatcaccacttggactgacatgaagagaatatttttggggaaattcttccctgcctctagaacagcatccatccggaaggaaatttgtggcataaggcagtttcctggcgagtctctatatgagtattgggagagattcaacaagttgtgtgctacttgtcctcaccatcaaaccaatgagcaattactgatttagtacttttatgaaggattgatgttgatggataggagtatgatagatgcagctagtggaggcgctctgatggacaagacccctcttgctgcaaggcagttgatttctaacatggcagccaactatcaacaatttggtgctagagttacaacaactaaggtgatggctgcaaatgaagcttctgtctctatggttgctgataactagagattggagaacaaattgactgagttggcatcccttgtgaggcaacttgctattgggcaacaacagaatgtgatggcagcaaatcaaccaaggctctgtggtatctgttgtgcccctgatcatcccacggatgcatgccccactctccaagagacagaacagcctgctgaagtttctgccatgcaacctggccagtcattcagacctcaatagcagtataatccttactccaacacttataaccctggttggagagatcatccaaatttgaggtatggccctggtccacaacaacagcagcactttagacctccacagcaacccttctagcctgccactactaaataccgacctcctccttttagacaacagccacagttctagcaacctgcacctgtacctgcacctatacctacacaacctgtgcaggctagttctggaccttccttggagaatttaatgaagcaaatggcaaccaacaatctccaatttcagcaaaatgttagtgccaccatccaggacttgcagacttagattggacaattagctacaactgtcaaccagatgcagcagcaaggttctggtaaccttccatcacaactagttgttaatcctaaaaatgtgagtgctattaccttgaggagtggcacgaaaattccagatgctagtgctagtaaaaaagttgataatggtgccaaaacagattctgcaccaaaacagattcccttaccttttccttctagagccattcctgcaaagaaagtcgtggagcttgattctgatctacttgagactttcaggagggtggaagtgaacattcccctcctggatgccatcaaacagattccaaaatatgcaaagtttttgaaggatttgtgcacctacaagaggaaacttaagggaaatgagcaagtgaagatgggcagaaatgtttctgcactgatacagggtaaaactgttgatgtcatcccactgtccaccctggcacagaagtggaaggatcctggcactttctctgtcccatgcaccattggagatattacttttgcagatgccttgtatgatcttggagcctccattaatgtcatgcccacatctgtttacagagcactacaccttggtgacatgaaacccactggtgttgtcatccacgtagccaacaggagtgctgcgcttccacttggacatattgaagatgtgcttgtgcgagtaaataatctgatcttcccagcagatttttacattttggatatggagaatgagtcttccagtgatgagtctgggatgaaggccctgtgaaaatgactctgtgatgttaagggatgatgaaaatgaaataatgaggaaataaaatgaaccagtgatgcatttcatacgcatatacccagtggggtatgagatgatgatgatgagattgttagatctcgtgaagaggagtgtcagataactaaactgagtccatataactagggggtagacgcagtgaggaccacaccaccatgatgatcacatggatgggagtgataatcctacgcgccactgagctaccctgaccagatggataagttcgttccactaaggtgagggtggggttatctgacagtggccacaattatttagacgttgctgagagctcagtcatgcatcatataacaaagatgagcatgcatttttttatgtgttctgagtggaaaagaaatgatttgatttataggtggaaaagaaataaaatagtaataacgcttataatatgttttctgtattttatttagttagtacgtaaatttaatttatctgtatctaatatttggtttgtatttaaattttgtttatcatgacttaccctattttgtgtcttgtggttgacacctgtgatgatcccaattatttgggcgagcagaggaacagtgatatggatatgatgcaagaagatttggtgaagactattgtgatgattctctgttttcatattttctactgtgctctgtattatggactgtatggactgtttggactgtttaagcatcgaactataaattggtaataacggtttgtatggcaagtatgcatgaattaattaaattacgttatttaattaacgcgttaatttttttgttttaacaaatcattttcaaaatttacgagaaatttatttgaatcttcattctttatgtttttcggaaaaaaaaaaccccgtatttttataaaataaatgcgaaataaagcgaaataaaagcggtcgttacacaaagaggcattcgagggattgaggaggaagctgactacctctcccatcatgcagccgccaaattgggagcttccatttgagctcatgtgtgatgcctctaatgatgcacttgggttgtgttgtcccaaagagttggtaaactatcccatgttattgcttatgcttcactcaccttggatgcagcccaagttaactacaccaccactgagaatgagcttttggctattgtttttgctctagataaatttagatcctacttgctttgctcccatatcattgtctttactgaccatgcagctttgaaatacctgttgaagaagcctgatgctaaacctagattgatcaggtggatgcttcttcttcaggaatttgacattgagattaaggacagaagtggtgcagaaaacttggttgctgatcacttgagcaggattgagggacctcttgagtcctttcccattcatgataattttcctaatgagcacttgatgcatttgcattcatcgcatgtcacaccttggtttgctgacattgttaatttccttgttgcatctgttgttccacctcatgcatctaggtcccaaataactaaacttaagagtgatgttaaatattatgtttgggatgatccttatttgtggaggtttggtagtgaccaagtgatccgaaggtgtgtgcctgaccatgaaattcagtctattcttcagttttgtcatggcacacctaccggaggtcattttggtcctcagaggaccgctaggagggtattagagatgctcatcactttaccaccacttgtgagcagtgttagagagcaggcggtacagttacacatagacatgagatacctcagcaacccattattttttgtgagatttttgatgtctggggtattgattttatgggtccatttcctgtttctcatggcttttcatatattttgcttgctattgattatgtttctagatgggttgaggctaaggccaccagaactaatgattctaaagttgttgtggattttatgagatccaacatgttttgcaggtttggcgtgcctaaagccattatcagtgaccacgggagccatttctgtaaccggtcattcacatccttgcttcagaagtatggggttgtgcatagagttgctacaacttatcatccccaaactaatgggcaagcagaggtttttaacaaagagatcaagcaagtgttacaaaaggtggtgcaacccattaggaaagattggagcaagcttcttgaggatgctttatgggctcataggaccgcttaccgcacacctttggggatgtctccctatagggtggtattcgataaggcataccaccttccagtggagattaagcaccgtgcttattgggcggtaaagagttgtaacatggcatttgatgaagcgggtatgcaaaggaagcttcagttgcaagaacttgaggagattcgtatggaagcctgtgataattccaagatttacaaggagaaagtgaagaaattccacgactctaggattcttagaaaggagttccatagttgccaaaaagtgttattgtttaattctcaccttaagcttattttcggtaaacttcgatctagatgggatagaccttttgttattactaatgtttttccccatggtacagttgagattaaaaatgaagctaccgataaagtcttcaaggtcaatggtcaccaactcaaagtatttcatgagagcccttgtaacaccccagacgtgttatcattaataatatcataagcgcgctatcagcgttaactaaacgccatgcggaagcgatagaatcgatttttcttgattacattatgcatggaatataaaccacattacagagcatcataaacaagcccctgctgatccaggtaacataaacttacacaacttaggcagaaaacatataaatctaaatagagataatcaggaggaaacataatctcatacacataacataacctgtacatatacatacaactcatagtttctaccacaactgtggttatacattaatatatgtacagtacaatgggtgtacactaacaccctatccttatacaaggtataagacagagatcaaaatacaagaacttttctagtcttcatctgtagcccatgacctctccagcacgctcaactgggcctcctgccctgtggttgctcctcgcctctagagcatctgaaaaccacaacccacaacaggggtgagatatatatctcagtaagctcagagtcctgggagatcctcccttaccctggttcacccccaagcacagacaaaagcatatcacagcctaggacgtcatcctggctatcacacattcccaactatctgggcactgactagatgttatcaacatcagaggtatcctacctcatactggctcttaagccatcttaaatcatctcacagaggtaccttaacataagtgtcaaccactggacacttttcataccagagaggcaccgcctcctgaaatcatgtaaacaatgcctgaggactctcactcaggactttactcatccatatatggctcatctaagaggccctaggctcccatcccctcgggaagccctctcttagagatacaacatatctgtcaactgcctggtctctctaggacttcatatacactggcctgggcaagaacatccatatagggcaatcacctccaggactttcacagcacatgccttagagagactatccacacaaggagctctcatccctcaggactttcagtcacattgcctgaggataaccactcaggacatccagcatcactgcctaaggaggaacatccatacagggcaatccatccttaggactttaggtggagagcagtggcacctccaaggagtatcagccattccaagggagtcctcaaactcttcctacggctagggaaccttagctagcccgatactattctagtatcctgtagattccagtactgaccatctcatggtctttatcacgtcacataacactctcacagtgttcatcaatccagaggcccaaggccccacacctgaaaccacaagtgtcaaaacaccctcacaccatcttggtttctttcctagggttcattaattcagcccagcacatactaggccatcatacagtcatatttctggaacggtctgagtttcactccaagcaccgttcgtctagcctctcaggctccaaacacatataattaacaaaacaggccacattggcctttcattccacagcatgcacataatatatatatatataaacaaatatggcatgtaatcatcacccccttgggtggtaaacaagagaaagggaataatccccagaacgatgagcttacctggcaagccgtgccttacagcttcaatcctcgaactatggcctgtgtctctgacacccacagtgtcaagccctatcaaggcacacaaccacatatcacagaccattcaaccagataacataaacaagctcatcaagcagtcctcaactgcctctgggaaaggaacctcagtcctttccatcaacccaggtcatctacccttaggttcctcaggcttatcctctataaacctttccctagaccctcagtggtctatctcaaatcaaccatggcctcagagtccctctagactcaacccaagccattcacaatgagcatcacagctcacaccacccaataactcagggtttccatagggcttgaacggtctaaatcacaagacaccattcccatggcctcacaagcacatcaagcccctcaacatggctcttgcatgtctcaaatcagatgactcagtccaagtcacacatgcatagcctagagccaaaaccaacagtcaccaaatcacaaactgaaagctaatccttcctcctcacatgattctaaacacatctctcaactggacccagagctaattctagctctatcacagatgggtcactattcatggaaacccctagaatcaaaattaaatggagaaacttgagtctcttacctcagtggcgaccagaaaggcttcaggacagcttcctcaagctctgttgtccttcccaagccgtgggtcctcaccaaaactcaagttctctgagtctctcctctgagattccacctctcactcaaaaggggtttttcaatagcagaaatgaaggattaaagctctcaaaggatttctagcaagattaaagatcattgggaggtgttttagccaagccaaggtcctagaaagcttgggatactctctaatggaggctggggtcgtggggaagaagaagaggctgatttcctcttcaatttcgcgttttggcccttttataaacctctgacgtgccttccacgctaccagcgtgggattccagagaaaagtggctttctggaacacttcccacgcccctggcgtggctcccacgctactggcgtggatcccccatgctattggcgtggctcccactctactggcgtggcactccagtggaagttaactttctggagcacttcccacgctactggcgtggctcccatgctactggcgtggctcacagcaaaaccaaaatttacgttttagaaaccacagttattatagccctcaagtggaggaagagcttgtggaggacatctctttggtcctgccaattttgtgtgaagatgtgtcttgaacgacatttggggagtttccttttcccttcttttatttgttgtctctttgttgcatttctttgcatgcttacattgaggacaatgtgcatttcaagtgggggggtgaagggtccttaaaatttttgaaattctggttattttctattttctgtttatgttttgtgttgtctgtttgtcagtatctatttttttttctattttctgtttatctgtctgtctgtattttgtttgtctgtttcaatttttgagtctgtatgttttgtttttgttgtctgtttttgctgtttctgtttgttgctgtttgttgctatttttattgaatttaggcactttttcatgtttttcataggatttctaatttgcataaattgtgaaaaatgttaaaaagttggttggattgagaggtttcatacttaatgtgaatcattgatgcaattgttgaagtgataagtatgcttgagaaatagagtttaagatgaaccatgtgtggtagaattatgccttgtgagtttttgagcctttgcgaatatgttctttcatgtgtgatttcacccttgtgctagattactctatgttttgccttgcctcttttgacattccttgttgcacatgctttgattgagatgatttaggccttctttcttttagctactagccaaataagcctatccttgtgttgatatccattgtcaccctctttgagcctttagccttttctttcttgtttagctcattagaaactaaaaaaaaaattatggaaaaccaggttaccctagctttagggagaaaaggggctttggaattattttgggagtgggtttcaaacaagtgtggggtgtttgtctttcgttttgtttgaaagaaaagaaaagaaagagttcaaatagcaaaagttcaaagaaaagaaaaaaaaattgtgtataagcaaagaaaaagaagttcaagcaaaaaataataataataataataatttatgcaataaaagttgttatagctcattttcatccttgtaaattcttttaaatttcaccttgcttctacccttcttttttcttgttggcttgctccctattgtccctcttttctcttaagctttagcctaaatatccttttcttatccacctttccctaagccattcattacaagctaataaagtctttttgatcttttgatgcatgtgtatttcaagttgaatgaatgagaggtttgtcaatgcttggatgtgctagttgcatgtggtgtttgagtgtaaatacaagccatacacatcatgtgaggttgagtgccaccctttgaaagaattctatcaccttggtgcattcttgattctaaacttgactactttttcactttgtgctttgtgatcatgctttcatggattgtttgttacctgaatgtaacgcccggccacttgcaggatcaacgactgtccctacataccaacacaagacttttcagtgtgctttgtcctcactcacacacttcctgagaaacttcccaggaggtcacccatccaagaattaatccaagtcaagcacgcttaactatggagttcttaagttatgggctaccgaaaagtagatgcaccttgttggtataggtagtacctattaaatccttttaagttatcctcaactgtacagtcccatacctgcacagcctctggatccctctcgttcgggtgtgtattcgattcattcatgtacccctcccgctggaagcctgccaggagccgctccttgtccgtgcctcactgcaccggcgatcactccccgccctcgtcagcgcccgggatgttacatgcccaccagcttccgcctggttcgtcctcgaaccacaccgtactggtagagagaccttgctctgataccacttgtaacgcccggccacttgcaggatcaacgactgtccctacataccaacacaagacttttcagtgtgctttgtcctcactcacacacttcctgagaaacttcccaggaggtcacccatccaagaattaatccaagtcaagcacgcttaactatggagttcttaagttatgggttaccgaaaagtagatgcaccttgttggtataggtagtacctattaaatccttttaagttatcctcaactgtacagtcccatacctgcacagcctctggatccctctcgttcgggtgtgtattcgattcattcatgtacccctcccgctggaagcctgccaggagccgctccttgtccgtgcctcactgcaccggcgatcactccccgccctcgtcagcgcccgggatgttacactcaacattattcttccatctttcatctctctcacttttgtgcattgttatgatccattgaaaaatatgtgtgccttgttcataccctttctttaaatttttggtttactttagtttgaatttttctcttagtctttcttttagttttgcccaggagtgcaaaagtttaagtgtggggtattttgatagagtgcttttagctgagtatttttctatccttcttagtttatttgacctctcttagacctttattttcctattctaattcattttttgacctaggcaagtaagtgggcttaattgctaattgttgcgtatttttggatttttggctcacttgacgtatctgacttgtgcaggacctatagggtgctaccaatctccgaatggagtgttctaggagtccctggaaagataacgaaaagatatacaagtttgctacaaatagcccgaggccaattctgtcatttagaggattattttaagctttgaagttaacacctctgcacttgtaattttgggctgcgaatttgactttcatggttgtaaataacaaataattagattgttgggtttgtttctggcccattttattttcagaactcagccattacatatattagtgactctagtgaaacttgggcagcaagcactctttacatttcaataaacaagttttatttttctttcctttagtttttagaatcaaaccatttttcttcattttctctcaactgttcttgcttgttcttcattgttcttcattttcatttttctgttcttccattctcatgcaataattccatggggctttaactgatgatgatcatggaaggctaaatcctcaatcaattcaaggatccaacccaagcacaaggagaatttgagttctggtttagtatttcgaatcctatgtgaatgttcatcttcttcttcaattgctattatgttttcatgattatgaatacgtttaggattgaaaatggattaggttatggattcatttcctaattttgaatattaatcacagattaattggatgatatttcagttagggttgtggtttcaatcaatttaggggttaagtcgataaggttgcttctaatgagattgaatgaactttcacaataggataaatttctgagaacaatgatgattcgaattgcttggtgaggtgaactagattgatgctttaattctgtttgacataacttcttttgaattctgttagtttctgtgttgctctttaattttagtttacgtttttgcaagttttacttacgcacacaaactgtttgataaaattcccccctcactgttattcgtaaattgaagctagaaccaaattgattgtgtctctgagtcgacctaggttaatcctgtgctacataattaacgtagttaaattgttttggtgcgtgtcaataacatgatatcaaaaagctccatagtctgttatgagcgcaaaaagtttggacacttcaagtcggaatgtcaaaatctggagaaaagtcaagataagaagaaattttttaagactaaagaaaataaggggcttatcgtcctcctctgatgaagatgatgaataagcaaacatatgcctggtggcaggaacaacatctgaaggatctgaatcagactaggaagataaggtaaatttcaatgatcctctaagtctcttaagaaagcttatcatgaacttttatctaattcatcggttctctcaaaagcttataaaaacctacaaagagatttaaaaaaatctatccaaatatcatttaaagcttgagaaaacccttcatgatcatatagatggttcactggataagtctgctcaagcatgtaaagcttgcaaaactcttaaagaaaaagagtccaagttatgcattgagatagagacaaattccagcaaaaaaaaatacccttaagaactttcaggagttggaaaacaaactgaaagatcttcaaaaggatctgaaggagcttaatgaacttcacaatcatcaaaaggaagaaagatatgatctttggagagagtgtgcacaagcacataaagattatgatgaactcaaagtgagtaaacacaatatttgggtggaatgtaaggaacacaagaaatctgcaagttttctaaaaaattagcatctgaagcatcaagaacttaaaggtcaacctcaagatgttgtaaaacttcttgaggaaataagaaccttaaagattgcattatccatgtttgtcaatggaacagacaatattaacaatttgttaagatattgtagaagttctactgataaatctggaaatggatatgaggggaaggtatatgttcatgatgaagatacaaatgtatgttagatacaaggggatcttgaagaggatcaagatgaagaggctccttgacttagacaagttttagctttttacatgtcattcaattgaagacatatgtaatttgttagttgtttaagagtttcttcctttgatcccttgcattgcataaacatcattcattgacatgcattcatgttttatcaaatcacatgtcttgttaaaaagcttcggattttcatgattgcataaagaagccaaatactcatggttaagttttggaaaaatcatttttttacactgacttaatcgattactagaatatggtaatctattacttaaaccatgaagaactaattaatcggttacaagataatgataatcgattacacagtataaaacatagaatagatcttcttgtgttaatcgattacaatctaattgtaatcgattacttagcacgtttatgaaagttaaactatcaatgttaatcaattactgataagtgccctattttagaacaaatcaaatttacaatatgacacttatcttttgatcttagttaaattgcttataaactaaccctaagcatagtcaatttgaatgtaatacttctataaatgttgtttttcatattttggaaagattagtccaatcaagtgtgtattttgataggttccaatgacattcgaagtttccaaagaattaaagctaacaaaaaagggcatatggatcaaaactaggggtgtcagaagcaacaaggccgaagcccaagacctttcttcattgttaagcttttaactcgcccaggcgagcagttcatgtgcaaatagctcgcccaggcgagtgactttcttcaacacgaaggcattaactcgcccaggcgagtgacagaaggcaaaaatgctcgcccaagcgagctgcaagttccaaggagatagacattagctagcccatgcaagcaaacacaggcaaatcactcgcctgggcgagtggaagcaaataggagcccaaaacctataaatacgcatgcaaggcttgagagatggaatgtcaatttcgttttctttcttccttgaatgaatttctgagctttttaagagagaaatagcttaggttgagtattagggagagtgagagaagtgagattagagtggagactctgctgaaaaaaagtagtgatggttcctttcatcaattcttcccttaaagaggtgtcctccgcaatggttggctagcttctctcaaaggattggatgtaatcttcttacccctacgcatctcttttaatatttatttacgcatgaatcgtttctattccttattggtaatttcattatgtccttaatgcttgattctacttgatcattagtttcatgaatttaatcctaagtgtgactagaaagtaatcttagggtttgaaccaaatgattttactcattacattacgttgctaggaataggacataacgttttgattgcatgaagcacgcggttatgattttaatgctgggatatttattcaatatgtgagggatcgatatttagtaaatatccttaggattctcaaatgcgaggaatcaatttggggttatttaagtagtgcaacaataaggatagaaaatgatttatggatggtaaaattaattgaatactaagggtaagaacgacgaaatccaatcctacacttttcttgaaatcaactaagcgcgctttatttgtttctgtagtttctacatccgttagatttttattctcattatatttgtaagtttcattatcgcacaaatccaatgaactttcgcttacactctttgtacataaactattaaactgttgaaattttatttgaattaactaaagtaaactcaagtccctgtggagatgaacttttataaattttgtaacttacaacgacaaattggtacacttgccaagagtctaacaagcttttggcgcagttgccagtgaattgattcgtttacttagttcttttgaaatttaattttttctttacttttgttatttataatctgtataaatttagttagtaggactttttctttacttttgttatttataatctgtataaatttcctttgtatatctttttaaacttggtgcttacgaaatcttgtagtttgctctttttcctttatgcgaggtaagttttctacagataaacctttgtttgatccagaaattaccaagacagaaaggaaaaatagaaagaaaaaagaaacaagaatccaataaaccaccgggtgaaacttcgtttatcgattctccttcaaaaccacttatacatgataatatggctggcagagggggagaagaaaatagaccaccaagaaggactcttggtgactatgcataccagcaaggaccaaagcactacaacaacatagtcatctctcctttcaataattaagttgtggagctgaagccagcattactcagtcttattgtctcacatccatttgctgtgctagaccataaggatccatacacacacttatccacattcatggagttatgtagcaccatgggagcctcagatgaagatgctgaagttgtttacctcagagcttttcctttttctttgacaggtaaagctaagccttggcttcagtcccaccaaacaaaagtttgagcacttgggacgaattggaggagaaatttatttctagattatttcctccatcaagattcatcagtgccaaatcaactattgctacattttcccaaggagcagatgaacctttttgtgaaacctgggagagattcaaatcattacttcgaagatgctcaaaccacaattttgatgatgctacacaattacacattttttatagtggtttaaggcctcagactaaaattatccttggtgccttagctggaggtatgatgatgtcaaaaagtccgaaggaagccattataatcattgactccatagcaaccagtgattatcaatctcaccatgatagatctcccatacagaggagaggtataatgaatcatgatactcaaaatgccattctagcacagaataagctcttgactcaacaactagaggccttgaccaaacaaataggccaacttcctcaacaaatccagcaaggaggttcacagaaaacacacacaactcatcaagttcaacaaatcctaagatgcaatttctgtggtggagaccatcaaaatggccattgttcagtatctggtgattgtcaacaagaagaagaggttcattacatacaaaatcaaaccagacctcagcaaaattaccaagaaaattaccaaggttaccgaggtggtccaggttcaaacaagaatccacaacagcaagcttagtctgatagattatcaaagatggaagacactctaacatagtttatgcagatgttcatcagcaatcaaaagaatactaatgcttccatcaaaaatcttgaagttcaagtaggacaacttgcaaaacaaatctctgagcatggaggtggttctttctctgcaaacacacaagtcaacccaaaggaacaatgcaaggctattacaacaagaagggggactgtggtaggtttgaaagatgatgaggagaaagaaaaaattgaaaaatttgtagatgatgagaaaaatgttgaaaaagaatatgagaaaaatgaggaagtggagacaaatgaaaaaatagaaaagaaagtgatgaataaagaagaaaagaaaaaaattgacaaatgtaaagttgtgttaacccctccaccagtccaacatatgccttatccatatgctccatctaagaaagcaaaagaaaggcagtacaagcgtttcctagatattttcaaacaactgcaaatcaacattcttttttctgaagcattggagcatatgccaacatatgccaagttcataaaggatctactcacaaagaagagaagatacacagatgatgaaaccatagagctggatgcaggatccagtgcaattatccaaaagaccatcctagaaaaatcaagagatcctggtagtttcacaattcttgtaactattggaaacttatccatgcggaaatcccttcttgacttaggtgcaagcatcaatctcataccattatccatggtcaagcgaataggggaagttataatcaaaccaactaggatgacgttgcagctagctgacagccattaagcatccttatggcatcattgaagatgttttggtgatgtggacaaattcttcttcctagttgactttgtagtcatggatatggatgaagacagtgaagttccattgattcttggcagacctttcatgaagattgccaaagtcttaattgatgttgatgaaggaaaactcactgtacgagtgcaagttgatgaagtgcagttcaatgtccttgaagccatgaagcatcccacagataaaagagaatgttttagagtagatgtcctggatgaggtaatttctgactctaaaagatttcttcacaggaaagatggcttggagaaagcattaactgaagcagttcaagatgaagatggagatacataaagatcagaatatgttcaacaattgaacacctgcaaagaaatttcttatcaccaatccctctttgaagaactaaaggaagagaagcagaaagaggaaccaaagttggaatcaaatttattaccttcacatttaaaatatgtttttcttgcaggtaattttgaaaaaccagtgatcattaatgccaatctttctgaggaagaagaaaagaaattggtgaaagtcctgcaggaaaataataaagccattggttggacattttcagatctaacagatattagtccttcttattgtatgtatagaattttaatggaaaaggattataaacctgtagctcaacctcaaagacgtctcaatccaaccatgaaagaagttgtcaagaaagaagtagtcaaactactagaggttggaatgatatatcctatttcagatagccaatgggtaagccctgtacaggtagtacccaagaaatgaggtataactgttatcaaaaatgataaagatgagcttatcccaactcgtactgttatgggttggagaatgtacattgattacaggaagctcaacaaggctactagaaaggatcattctccattacctttcatggatcaaatgctagagagacttgcaggtcagcaatattattgttttcttgatggttattcaggatacaatcaaatcaatgttgatcctgaagaccaagagaaaacaacttttacttgtccctttggtatttttgcttataggaaaatgccttttggtctttgtaatgcacctgctacctttcagagatgcatgcttgctatcttttctgatcttgttgaaaaaagcattgaaatcttcatggatgatttttctgtatttggtacttcttttgatttatgcctgtctaacctggatactgtcttgaagcgatgcattgagacaaatcttgtgcttaattgggaaaaatgtcactttatggtaactgaagatattgtattgggacataagatttatgtgcagggcattgaagtggacaaagccaaagtgggtgttattgagaaattacctccaccaatcaatgtcaaaggcattagaagttttctgggacatgcaagattctacaggcggttcatcaaagatttttccaagattgctaaaccattgagcaatcttttaaacaaagaagtcccatttcattttaatgattcatgctttagagcttttgagactttgaaacaaaaattagtttctacacccataatcactacaccagattggacccttgattttgaaataatgagtgatgcaagtgattatgctgtaggagaagttttgggtcaaaggaaaaacaaagtttttcatgtcatacattatgcaagcaaagttttgaatgatgctcaaatcaattatgcaataactgaaaaagaattgcttgcaatagtgtatactttggaaaaatttacatcatacttgataagatctaaagtggtgatttttactgatcatgctactataaaatatttgctagtcaaagttgacctaaaccaagacatatccgttggtttctactattacaggaatttgatctagaaatcaaggataagagagggtgtgaaaattatgtagctgattatctttccagactcaccaatgaagaagtagccacacaagatcctgagattcaagaagaattccctgatgaaaaattattcaacattttagagaggccatggtttgcagagatgactaatttcaaagctgcagaagcagttcctgaagattatatatggcaccagagaaagaaatttttcaggaatgccaagttctttgtgtgggatgatccgtagctctttaaaattggagcagataatctcctgagaaagtctgtcactcaagaggaggtaagaagcatcttgtgacattgtcacagttcaccctatggaggccactacaatggagaaagaactgctacaaaaattctccaatcaaaattttattggcctactttgtctaaagatgcacatgattatgtccagagatgtgatagttgccaaagaatagggggaatttccagaagaaatgaaatgccattacaaaacattctggaagtcgaagcttttgattgttgggggatagatttcattggtccatttccatcgtcctattcaaatgaatacattttgttggctgtggattatgtgactaaatgggtagaagtaatagttgcacaaaaagctgatgcaaagatagttgttcgcttcttaaagaaaaacatttttacaaggtttgggacaccacgagtattgatcagtgatggaggatctcatttttgcaacgtctaacttaaaaagatcctccaacactacagtgtcagacataaggtggtctcaccttatcatcccaagactaatgggcaagctgaagtttcaaatagagaaatcaagaaaatcctagagaagacagttgcccagtcaaggaaagattggtctcagaagttagatgaagctttgtgggcatataggacaacatacaaagctcctacaggacttacaccttttcaattggtctatggcaaatcttgccatttacctgttgaattagaacataaagcattctgggcattaaaatttttaaattttgatcctacttctgcagctaaacaaagaaagctccaacttcatcaactggaggaattgagattttcagcttatgaaaattctaaactttataagcaaaaagttaaattctactatgatcaaaagcttgtaaaaagaattttcatcctggacaacatgttttgttatttaattctagattaagattgtttccaggtaagttgaaatccaagtggtccggacccttcaccataaaggaagtaatgtcacatggagctgtaacccttgaagatctagccacaaaaagaacttggactgcaaatggtagcaaactcaaacactacttaggtgataatgttgaaaggctcaccactgtggtacattgcaagaagtttgagctacaaaagcgtccagctaagacgacgttaaagaagcatttctaggaggcaacctagtacgttttaacttctcttttatatgcttagtaaatatatgcatatatgttgaaatatatgttcttagaaattaaaaacaattatatataaattagcaaaacattactaatattccttattcctaaaaaaatggtttaacttgccaaggtgagtgaaccatgagcaaattgctcgcctgggcgagcctatgtctgcagcaccaaaacgaaaggcaaaaatcaagtttttactcatttttcccgaatcactttcacattcatcttgcttcttgttgtgattttttcttcttctattctctaactcgcccaagtcactgcaattatctcgttctccatacttcaatcaagtaagttccatcagcctttaaaaataattatagtatgcctgtttcctctagctttcttgtatatgtacattgtagtagtgtagcttattgttttcttctaagttttcaagcatagttaagtcaagaaattttgaaattatgtccatttggagattgattttaattgtatattctgaattggtcctcttcttctcctattctctaaaatttttggcgtagttatgtacaaaacaatttcattttcatacaccaaaaagtgtgcacaccaactgtttggtgcaatgccacaatgaaaaacagccatgaattactcctatttgatgcacgaaaaattgctccttacttgtcttagaaagcttgaatgtatgctttagctcatcataggcttcaaagcttgaattactcctttgtgcatgacttggaattttcactaaaatgtccaaattacatgcttaaaagtctagcacttagatttgcatttgctaaggcatgcattggaataatatgtgtcaaattgtccaaaaatttattgacataattcatgacatgtacattagaaaggttgaaaattatagcacacatttttttttgcaaaagttgaatgactgcttcatcacttatacgctgccatctacttgctatttgaattaaattaggaaaactctgaaaattttcttgattgttgcttcctaaagattttatcatattcactttttccatgctgagatgtttttcagatggctcccaaaaagctctcaactaaaagagctaggcacgtaggagaaagatccagttcaaaccttcctgaagacttcatatttgataagcagaggttccagagcagagaacaccaacaacgttttgagagaataaaaaattggtcgtttctcaaagaaagaaaagttcgattgatggatggagaataccctgaattcacagcggagcttaacaggcgcagatggagacaactagccactctgatgcacaaatttgatccagcagttgtcttagagttctatgctaatgcgtggccaattgaagaaagtattcgagacaagtgttcttttgtaagaggccagtggatcccctatgatgctgatgcaatcaaccaatttttagggaatccacttatcttggaagaagggcaactctgtgaatacatgaccaggagaaacatccttacaggctttgatgaataggttatgacttagatactttgtaggcaaaagaaccgaaatggtgtttttttacaaaatatttaccgctaaggggctgtttcacaaatatttacagaaatggggctgtgtaacatgcctggattagggcatgttacaacacgcctagattggggttgttataacatgcctggattaggcatgttacaacacgcctagattgggcgtgttgtaacatgcctaatccaggcatgttataacaaccccaattctataaataagccccccccccaccatttcctcactttccactatctctctagaagtgctctgccttctctctagagttttcggtggatattctgtgcagcgaagctctgctgaatttcgaagttgttcagaaaaaatcttgcgaacaagtaagcgctttgctctgccttttagtgatgttgttcttaattagttatttatattgttaatgatgcatgtacttattttttagcacaatagatgttaggttacttgataattgttttagtttaggctttaagatttatttattagaaaaatgttaggatgatgttaatttgttagtgacataaatttaggtggatagaaaattatttaggtgtttggtactgtacttttggctaaaaatgattagaatttaaaatttagggtttgctgagcatggttaggtagtgtttatggtttgatgatgtgatattcgtttgtggttaatggtttagggtttggttggcatggttacttgacgtttggattagggttggggtattgttgggtttcatggtcatgtgacgatggtgtgcgatttatggtttggttggccttgtatggtttagggtttagggtttagtgtttggttggccacgtatgtgatgtttagtccagggttgagtttatggttggtgtcatggttctggttgcatggattagggtttggttaagggtttggggtgcggtcattaggtttatggttgtaggccgaatggggtctagtgtttagaaatttgttgttttaatgatttgtgaatttggaataattgttaacatgggtttttatttttggtgtatgaagttactgataatatggccgatttatctggatctgattcgccgcgctctgtatccgatcatgaggctgagccgatggatccgacatcttatgtggttcctacctcgtacagatagggcgctctgcgtaggcgtactcagcgcacccatgtttcacaatctgtgtggaacgagggcacagtacgactactaaagactcgacgtggcaaggcgtcggggggaccagcatatgacgacattcctcaagttgtttctaatatgctataggacgctggctttcttcatgtcgcacgcatgcgacatattcaggtatggaacacgtcatactagtaatcaaattttatttaaccataactaaagttatcaattgattaatgatattgttttagattgatgttgccctgattagtgctctggttgagcgatggaggccagagacccatacgttccacatgccacaaggcgagatgactatcacactacaagatgtggctggtattttgggattgcccacggctggcaatgtcgtcatcggagtgactttgtccgattggacggaggtgattgaggacgttttcggtgaagaacctgatgacgaaacagagctgaccggtggatacctacggctgacgcggtttgcaaaggtgcacattgcccgccttattggttcatggctgctgagcaatcgatctggaggtagcgtgatggcagcacgctatatctgtttgttggctggggatttcccaaagatcggaggatacagctgggcctctgcggtccttgcacatttgtttaggcagatgtgcgagtgtacagatgcatccagaaaggacattggtggatgccatatgttgcttcagtcttgcatccttgaatctttgattaaaattgctgacaatgtggcgcaggcaaaacacatgatgcgcaaaaggtggttgccaaccaggatgactttgaacagcagatatgatgctccggtggcgatccgaaatgaggcatatattttgcatgcgagtaacgtggaagcaaatgtttaaaaggaagtaattccaagcttccaacgtctccccctcaacaacggcaaatgccaaagaaacacattcattattcccatcctgagttgtggcaaccaacaattttcctttatactttccatataaatgagtgccatcaacttgaatgatgggtttgcaatggttaaatgcctcacaacactgtccaaaagtccaaaaaatgcgatgaaacacgcgctttgcccgtaccagtcgatttgcaacaaagtaatcattcgtctgaatatcaaaataagaacctggtgcaaaacgaagcatgtagttacaccacctgggcaagaatgcgtaagattctacccagtccccataaaccattgccattgctttctgcttcgcctaccaggcctttcgataagaaactttaaatccgaatgtgttggtaatcctctcctgaaccaatgagattgacactgatggttcctccttaatcattcctaaaaaaaaattgaacaatcacatcaacaacatgctttgaaaacaaatatgtcttcgaaatgcatcacagtaaattaaaacataccaacaaccagtgaggcaattacgtcagcatcaagctgtctgtgaccctgtgaaacatgatcattcaagcaattgtgttttccaccccattttgaaacaacccacttctcacggaaaaatggtttaataaccctaaccctccaagggcaaccatcagtatgcgcaacacacttcatggaaaacttgtcaggcttgctctcaaccacaattgcttcttgatgctccttcatcaagttatgcttcactgctaattgtgcttcctttttcgagtcaaattcttgtttcagaaacaaatcatcccctagttgccacggaccctgcactgatcctgaacccgaaccagaaccagaaccgctaaaagagtcttgttcgggtgggtaactccaatcaatatatgtataatgaggaattccttgccagaaagcagttgcacattgaacgtcagtttaagtaacgatatcagctaaaaacaattagacaaccctaacccgtcacccaaatacccaaaccctaaaccccaatcaaaccctaaacctcaacagcaacccataaaccccaaccaaaccctaaactcaacacaacgcactaaaccccaaccaaaccatctaaaccctgcacactttcggttaaacaggatacacttatttaacctaacaaaataacatcatttaacggacattaaaaagcatattaataaacgatataaaacaaattaaatgacaaaacattctaattcacattgttagctaatttaccttgttctggttgactcgaagcaccctccgtatgatgacgagtttcagatggctcgacattaacatcttcctgatgtacatcagcatcctcatcctcatccgacgcactagcatcctcctcaagaagccgatctttcattgcgatattttcatcatcatcatcctcttcatcctcatccatgatccaagttgggtcatgtgaaccctcctgagacacgtttacctctccgccaacaaatggtgcccctccagcagcatacgatggtcctccagcagcatatgatgatgtacgatgtggcactgcctggatgggtaaagcaacatcctcaacttctgtaatatccacgtacaactccaaaaaatcttttcttccctggttgcaaaattcttctagtaccaactccacgtcttcatcatccattatttgaaaccccatgaacttctcgtgttgccataatcttccagtcagtaaagtgattgactggttgatactcagacataatttttgtcgtatcttttcatgcaattcactcagggttgacgtacgtctcacagaggttccttgtgtttccccttcaaaaatcacaccctgttggccttgatattttcttccattccaatataagacaacgcgaacagaattaccacctgaactcatgtttcttgtcactgacaacaccttcaaaaatctatgaaaaaatgaaaaaacaccagaatgatggcagtttagcagaggcagagaacactggaagccaatatatgaaggaactggggggggcttatttatagaattggggttgctgtaacatttctggattaggcatgttacaacacgcccaatctaggcgtgttgtaacatgcctaatccaggcatgttacacagccccagttttgtaaatatttcatgtcacacaaccccatttctgtaaatatttgtgaaacagcgccttatcggtaaatattttgtaaaaaaacaccatttgggttgttttgccatactttgtatcctaggctgtgattttgctagaaacattgcagctaatagggtaaggctgatgagaactaacatgactactttaacttaaatttggatgacatttctcttgagtaatatacttctaagtgaccataactctgatctacccatgccaaaatgccaaatagtttttagttgtattacacagatcagtattgatgtgaccagttaatttcagatgctattcatcattttgtacagttggaacctcctaggcatccgcttaacccggagaagtccaatagggcacttggattccctactctaatcactggattatgccaattctatggaatccaggtgcacccttccaagaccatcagacctcccatcaacaaaacctttattgagaaatattgcttggctagataggttcagcagcaacagccaccagagccagcatctttggactccatttcagcacatctacagagaatggagctccaaatgaatacttacatgcaacacatggctgaccaacaggctgccaaccacagaggccaagtgcagttaaatgaaagcttctacaactatacactgcatcaacatagataggatctaaaccccatagcccactcccgatcagttccgagcttatgttgcatggcctggggacaggccaatctttccggaggaggtagaaggccctagggctgataaggagcttgtagctgatgaaggccttttagctgaccaggaagctgttggtggagaagaagcagcaaagatgaggacataatgcataatttggcagattatctcattgatctccaaaatcagtgacattatttataattcctttaccgctttatttaccgttttctttactacttgaattaagttactattttattttcgttttgtctttactattcttcttaactatctcacttttactgacaatgttagactttttgttgaaacaattgtgtgcacttatcatctttttagtattgtgcactttgatagggaacacagaaggttccttctttttgggaatttatacatactttttggattaatattttttgcttagtaacatagttgtatataacataactctttttgggggcgtaaataagaaaacttttcttgaatatatacatgttttcaaaagaatcaacagataaatattttgaaacttactttttgatttggatcagaacacaacaaaaagaaatttttaggaaactttgagaaatgaaaagcaaatgaatggttttccaaagatcaaatgaaggaaaatatgtttacatggaattgataaataacatctttcgaaacatttatttgatttaaacatgaaaatagaccttgagcccaaatgagtgtgtgcatccacagaaattacatcgagtgtcctcattgatctgttttacagttgattttgcatgaatttctaattgtcataacatatgattcatggatatgatttaggccttctctctttttgaacatctttaagagccactggccaaaaagctatcccaatacttaatgatttatcatttgtaaacccctttgagccaaacacttgatattttgttagaaccctaaccgaaaataagaattccctaccttatcttaggttaggagagcaaagggatagcttatttttgttggatacttttattagtggagaagtaaatatgatgaaaaagattttgtgttttaatgtggctattaaaaacaagaaaagaaagaaagaaaaagaaaaagaaaacaagattccttatgtcctaaattttagtattctataaaaaaggaatgaatagaaggtttgagaaatatggatatctggttagaaaaagaaagaaataggaaaagtgatgacagcatagtttttatccttatttgctctcctttcctcaaggtactttttgaatatccagaaaaaccaagatttcttttctagctagacccaaccttaaaagccctaatgatccatgataattatgcactatgatttgatgggaaatgaactgcaaaattgatctatgacatatcagtgttggaattgagaataaaacacttacctatgggagaactaaacaccttcaagatgttttcctctgtttgaatcattcaaatttttcctctgatgttctttagaaatgaaatgtgaattgatcttaatatcatgtggttttatgaattccattttttgtattttcaaattctcaaggttaactatttgaaaattttgttctgatcactcttaaaagttgattctttacaaagcatgaccttattaaaagtatctttttactttgcttgaggacaaacaagattctaggttagggggtgtgataagtgccctattttagaacaaatcaaatttacaatacgacacttatcttttgattttagttaaattgcttataaaccaaccctaaacctagccaatttgaatgtagtacttctgtaaatgttatttttcatattttggaaagattagtccaatcacgtgtttattttgataggttccgatgacatccgaagtttttgaagaattgaagctaacaaaaaagggcatatggatcaaaactggggtgtcagaagcaacaaggcccaagcccaatacctttcttcattgttaagcttttaatttgcccaggtgagcagtccatgtgcaagtgactcgcccaagcgagtgactttcttcaacacgaaggcattaactcgcctaggcgagtggcagaaggcataaatgcttgcccaggcgagctgcaagttccaaggagatagacattagctcgcccaggtgagcatttttgccttctggcactcgcctgggtgagtggaagcagacaggagcccaaaacctataaataggcatgcaaggcttgagagatggaatgtcaatttcgttttctttcttccttgattgaatttctgagctttttaagagagacatagcttaggttgagtattagggagagtgagagaagtgagattagagtggagactctgctgaaaagaagtagtgatggttcccttcatcaattcttcccttaaagaggtgtcctccgcaatggttggctagcttctctcaaaggattggatgtaatcttcttacccctatgcatctcttttaatatttatttatgcatgaattatttctattccatattggtaattttattatgtccttaatgcttgattctactttatcactagtttcatgaatttaatcctaagtgtgactggaaagtaatcttagggtttgaaccgaatgattttactcattacattgcgttgctaggaataggacataacgttttgattgcatgaagcacacggttatgattttaatgttgggatatttattcaatatgcgagggatcgatatttagtaaatatccttaggattctcaaatgcgaggaatcaatttggggtaatttaagtagtgcaataataaggatagagaatgatttatgcatggtaaaattaattgaatactaagggtaagaatgacgaaatccaatcctacactttttctcgaactcaactaaacgcgctttgtttctgtagtttccgcatccgttagatttttattctctttatattcgtacctttcgttatcgcacaaatccaatgaacttttgcttacactctttgtacataaactattaaactgttgaaattttttttgaattaactaaagtagactcaagtccttgtggagatgtacttttataaattttgtaacttacaacgacaaattggtacacttgctaagagtctaacaattacatagcggtttaatcgattactttgctcatgtattttttccagaaagaactaagaagactttaaccgattaaatactatattaatcaattacatgagtgaaaataattgattacatggacaaattaatcgattacattagtttttcaataaaaagttgttgggtcttttgatttgaacacattatcacagttcgagattttcactgattttcaaaaggcttctgaattgagagaaaatacacttagtaacaaagctcttgtcttacaattcaatatcttcatgcgtcattgattgagttccttgtggacaagatttcaaaggagattcttggagagcttggtctgaaacttgctttctttcaacctgatctcagattggtaaacatttgcatttgcattctctggatcataagattgtatctctcctcttaaactctggttttaatttgtttttacattttagtttgttagttgctattacaaaagggttctttaagcttgtttagagtagggttctctaaagggaaaagtagagaagggtttctctatgtcttgatcattagaagtttgaagggtgtttagatttcaattctttatctagggttgataaagggtgatcttttgtaagcttgtaaagaatagtttttgttgatagtggaactctagccaaggtttggttagaagaaactgaatgtaacttctcttgtcgagaggtgaacaagtatagttcttggttttgtataccttttcttaatctgatctttctgtcattaattgctagtctttaggaaaatcatttcaagatcaatgataaactttttatgttattgctttctgtgaagggtgagtcttgattgactgaaagtatctttttcaaaagggtgtccttgtgatacgatcctaaatgtgttgcttgtttttgaagaatttttttaaagatcctgttttaatcaattcacccctccttcttggttaattgtgtgtgttcatattgttttcattgtatactatttatatggaaaaactagacacatgatgtccaaatgcaaggatcgtcctaagaagagttcacctaacccctttatgagtaacacaaaaggacccaaaaagatttgggtacctaagaaaacaaaattattgttatagatatccttgatagcatgaaacagatgcctgtcatggtacctggacagtgggtgctcacacacatgatgggagaaaagtctatgatacaatgcctgactccttatcatggtggaacaatcactttcagagggaatcaaaaaggttgaataaccgacgtgggtaagattaatattcgcccttatccctctattgaaaatgttttgtttgttgaagatcttaattataatccaatgagcataagtcaattatgcaacaatggatatggtgtatccttcaacaaagatgagcgtgtcgtccggtgtgaggatatgtctcccttatttctgcaaagaggaaaggaaaactctataagataagattgggggaactctcaaatcaaaaggtgtcttgcttactgtcaataaaataaaaccactggttatggcatagaaaacttggccatgcaagttagatgttaatgtctgaactgcaaaaaaaaaaaaaaaaaaaaactcgtaaaaggtttatcaagttgtcatataaagatgatttactttgtgaggcttgtcaaaagggaaaacagattaaaaactctttcaccagtaaaaacatagtttccacctctagacctctctagctattacatcttgatttgtttggtcctattggaactgcgtccaccaacggtaagacttctggacttgtcatagtggatgactactctagatggacatgggttatgtttctaaaccacaaggatgagtcttttgatgtctttttaatttttggaaatgagttctaaatgaaaaaggagtatgcattacttcaaccagaagtgaccagggggagagtttgaaaatgaaatgttccaactcttcaatgtataaaggctgcctaatatggcgttgtaagcacattgcaattttaccacaatgaacctaatgacaattattctagttattggctcattcccaaaggttacgtgccatttcacatatctaatgggagttatttagtgtccagagaaacctatgaggtcctcgttataggggagcaacttcaactaagggatttcgagattcctaagaaatcataaaacattatatctgtagagttgcctatgtcgacaagtaaccaatgtgaaaatgataggaacacttcaaaacaaccaagaggggggggtgaattggttgaacctaggtaaattaaaattttcaaatcagagtttccacaggatctttatcactttaaaaacattttttgaaaccaagaatcttgtattcaatcaaattcctctgtcaagaaatcaataagcaatttaaaactttctgtgcaatgtaacttgattcacaaccaaagcaatttagagatgaagagaaaggaataaagatcagccacaaattttatactggttcacttcaaacactatgaagctacatccagttcttccactcaacactatagtagagttccactattgcaaataatattcttacaagatattacaagcttctctttatcaaccctagataaagttcagaagtctaaaacactattagacccttagagaccaaacccaaaactgagaacactactcagcaacccttagagaaacactatctctaatcttcatgtaagaaaccaatttacaataagctaatccttatagaaatcaattaaaagatttacaccttcaaggaataaggaaagttttcacctgataatccagaaacatatgcatgtgaatgattcaacatgttgaaagaaagattacagactcaatgcatccctttccttatgctttgaaccttaatgatgcttcacttctttaagatcaaaaacccatacgaatttgtgaagtctaaatgcttttagaaacccagaaatacactaaagaaagcttaggagtgtttgtgaatgctcagatttcgaaattctcaagttactaaaacacagagcaagaggttttatttataacaactttctaactaaaataatcgattaaacacgctcctgtaatcgattatttcgcatttgtaatcgattaaatcaagaatgtaatcgattaaagttctcttgatatgttatgggtttgagctataaacaatgtaatcgattattctgtgaagtaatcgattaagacagacagtcatgtctttccaaatgtactatgtaatcgatcacgaaatttggtaatcgattaagacagacaatcctatattctcatatgtactatgtaatcgattaaaacgatatgtaatcgattaaatcagcagaacatgtaatccataggcatagatgtaatcgattacgaaattatgtaatcgattaagacagtcagtaagatttttcattttagcctatgtaatcgattaattcgatatgtaatcgattacaatgttcttaatttattttccagaaggcacgaagaacaaaataatcgatgtcatcaatgctgtaatcgattaatgcaggaaaacatcatttttccaaaaactttgctttttaaattgccttacttgttaattgcttttacttagaccttcaatctaacaatcctagatgaatgattatgcatgatatgctcttggattatcatattacacaacttccctttttacatgaatcaaattgttcttcatagcttctttggcatttttccaatgaggcatgctgaaagcacaaaacaccaaagcttgatccttgttcatttatgcatagctcctcttgaatcaacacaatgtacctccttgttgtttataaaagccttcactaataagggatcgttatgagttggaacgatcgacatgtccatatctttgtcatcaaagatcaatggaagaggcattattttgatcgactcataatttcttccgccatgtgtagcagtcaagacttctcttgcatgtcttttccgagcattatttgatggaactttgttggcaaaccctcttgctatggcatatatcacctcatgctctcgctgaggggagtttggtcttctctcaggagaatccgacttctgtttcaactcggatccataatgatgcacagttttcacatgattttccacttctctctggtgttctatgtcaataccttgaagattgctctatggaatgtccttttctttggtatcaactaggactcttgaactttctcactgctcatcacgaggtggctgatgatattgaggtctgaagtttcctccccggccttgcacatatctgtctagatttccccaatgaatgagggtttcaatagcatttttcaattgaaagcaatcgtcgatgtcatgtctagttgctcaatgatagcaacaatattttgactaatctttcccaacaattacaattcttaatgtaacaccccgtatgcatccggtgtatcaacatattatttaatcagataagcgcagtaattactttaattaaaaccccgcggaagcattttcgaaaccatatttcttgatacattatgtatagtatgtaaaaatcacatcacaacacaagcccctattgatccagaataacataaacataggtagataaccacaagtgtcacaatcaactgaaacaggaagaatcacaattacataacttaaacaggttatgtacatatgtatcatctgacactcgcaatgtctatacaaaggaataagcatccaagtgctttgatctcaaagatccttcctcacacgaaggcatacaagatatatatatatatatatatatatatatatatatatacaacacaaaacatagcatgtgtgcatcttccctctacaggggtacaaagcatcatcagcaaaaatgagctaccaagctctcctcaagctgacacacgtcgtgcagacactgtctctactggggccttccgccctgagaccgatcatctctgccagaagagtcacctgaaacaacataaagcccacatggggtgagatatacatatcagtaagctcaaggtccttagaggcatctcctccaccctggctcactttcatgacacacgtcatcaaggcatcacaaacaatctggcctcccagccctcataacaatacatagccaagtcatctagctctaatgtatactgcggaactaggccaccataatgcatcatcatcagcatcaaaccttagtgtgagatcggaactcacacccgtgccatcccatcgggagctagcccttacgcatggacgcacatatatggcacaaccgtgacgggaccacctatctcttggttttaagggatcatcatcaccctaagatcatcatcactcaagagcaaaccaaactaggaggtgcgctcttctcctagggaggtccatatctatttaactggtcagaagatctaatcaacaggtatccatacatacatggcatagaatcatgcatacatatcattataagcaagtaacaaccatttaatgcatgcatcatgaatgcaaccatcactccctcggagtatggtggaacacaacagtgggaaacatcccaaaggaaccaagaacttacctggcaaagctgtgctctgcggttcggtccctgaacggtggtctacgccactgacaccctcggtgtcatgccctttacaaggcataagctcaatcaaaaccaaagcaacctcacaaggtataagcataacacatgattctcaactgtcaccatgaaaggaaccttattcctttctaaacctctaagtcctctaacttaaggtttatcaagaccaaccaaaaacattaacaacccgtagaccctcaatggtctatcttggcctagccaaggcattagagtctccacaagacacaacaaagagttcaagctctatataggccaaactcaagaattcacatatggcttgaacggttcttctcacacaagacaccgtttctaaagcctcccaaacacatcaaagcaattatcatggctcttgcatatcatagcatcatcaagtgattcaatatactagccacacatgcatatcacagagccaaaaaccaaggttcatgaaactaacatttgagagctaatccttcatcacaacaatgatctaaacatacttttctaaaggacccaaggccactcacacctgtaatatcaggtgtttcattaccctcacactgtctcagtgtctatcctagggttcatcatttcagcccagcacacactaggccgtcatatatttcaatatatctggaacggtctgagtttcactccaagcaccgttcatcgatcctctcaagctcacaatacatataatcgacaataacaggccaccttggccttcctcatgcaatatatatcagccattgcatggcatattcaaacatcacccacttgggtggcaaacaaaagcaagggaataatcccccagaacgatgagcttacctgatagttgtgcctgcagctccagcccctaaaacaatggtctgcttctctgacacctcgggtcaagccctaccaaggcaaccaaacacacatcacagaccatataagcacagaagcatacataagctcatcaagcagtcatcagctgcctcaaagaaaggaacctcaatcctttcatcaaccccaagtcatctgacttaaaggttcaaaaggattatccacatgagcctttccatagaccttcagtggtctaacttaaatcatccatggcctcagagtcattccagactcaacacaagccatccataatgagctcagagctctaacaccccaaattcacagggttttcataggcttggacggtctatatcacaagacaccgtctccatggccactcaggcacctcaagcccgtcaacaaggctcctgcatgtctcaaaccaagtgactcagttcaagtcacacatgcacaacctaaagccaaaaccaacagtcaccaaatcacaaactgaaagctaatccttcctcctcacctcattctaaacatatctcccaactggacccagagctaattctaacgttatcacagatgggtcactattcacagaaaaccccaaaatcacaaatcaacagggaaaactcgagtttcttacctcagaactgaagaggaaggcctctgagctactctccttagctttggtgtcgaagaaccacttccgttcctcgtcaaactcgagctttcttcagcctttctctgagttgagcttctctgtggttttaatgaatatggaggaaggattctagctcaaaggtgatttctaggagatgaaaagggtttatgaagtgtttggggtgaagaaactaggtcatggaagattaagaagctctcccatggctgctggaggctctaaggaagaagaaaatggttttcttctcctccaaaacgcgaccccctttaaatactgtctgcaacgacctttccgcgctgaacgcgccaggtcccgtgctagctacagaaactgtggcaccatcagcgtcactcccacaccaacagcgtggacatgccgaacctgtggcgccatctgcgccacaactggcgctggccgcgtggaaaaccagagagaaatggttttccaagccacttctggtgcgacccgcgcggcccttggcgctacccgcgccacacctacaccctggcgctatccgtgtggaacgccgcgccaaacccttgggtattacattcacccctccttttaggaattttgtctgcaaaattcccaaatccatatctcactatggactaaacttacttcacaaacctcacaggtcatgtaggatttatcagattctctcaaatctaatcacggttgggcttttcacatgtgatgtatccatcacaccaccaactaggacacatggcaactctcatgccatccaagtgactgggaggcaacctcctatccctcaaagcccatcctacacctgtgatcggagacagcctcagacacctctgattacccttacccactatcagggttcggtgtctaggatcacatattcctttctatcgactctgagctttcaaacctaactctgatcctccggatttgctcaagagtctctcgaaccatcacaggttcaagaagctgtcttttcctctatctctgccagatcaactggggtcctacaccgtcggcctccacagagcctcatcaggtgccatgttccactaacatgtgaaccatcattatcaaggaactccatcataggcagacatctaccccagctcataccctgctccaaggtacgctcacaccacgcatcctccagaatctagatggctcgctccatctgatcctccatctgaggatgataggctaacctaagcctcagctaggttccacaccttccgaagaacacctcatacctagagataatttcgggtcactgtcactaaccaagtgagatgccagacactagccatatccacggctatgtctctcctcatccctggccaccggaaatcctatcaggataccaacatatcatagtggcccttggatgactatcaaccattccttatgaacctcagtaaggacgacatctaccagctctctctcttggcaccacaacaagactttgttcatcataagccaggtgcctactaagaaacatcctactggtctaaaatagccctcacagccacattatgtggctgggcttcgataggcgcacatctcttgagctgctcactcagctcacagtcaaagactgtcatcacgcatggatcactcccatgccatctcgctcgagatctcaggacatgtccaagcctctgctgggacgcatctcaagcatactggtcacccgacctggctctctggccctcatatccttatgagcattcatctgctccaaacacatggcggagctacctcaacgcccataacaagcatatggcggagctacctctatgctaataacaaacatatggtggagctacctcaacgcctagcggagctacctctacgctaataacaaacatatggcggagctacctcaacgcctagcggagctacctctacgctaataacaaacatatggcggagctacctcaacgcctagcgaagaaaccctcaacgcattgcggagacaccctcaacgcatatacacatggcagagaaccctcaatgctcggcgaagaaccctcaacacctaatatgcatggcagagaaccctcaatgcctggcggagaaccctcaacacctaatatgcatggcagagaaccctcaatgcctggtgaagaaccctcaacacctaatatgcatggcagagaaccctcaatgcctggcggagaaccctcaaggcctgacggagatcctaaacgtcaatctcggtgtgagacttgaaatcacactcgtgccgtcccatcgggaactatcccttacacatggacgcacgtctatggcacctccgaggtataaaaggagctcctcaacctctatcctcttggtctgtaagaataaccaattccctggaagctcctcaaccagagaaaaccagctaggaggaaacccctatcctagggaggtccatatcgatctatctcagcaaccaccgcttcctcgaagcatgattctctccatcacacacatggagaactaacacatatatttacacatgtatatgtatcaggtatatacccataccttgcctctggtcagaaccctctgacagcttgtctagtacctctggagattctctctgtctggttgtcctcctcaggacactctttcgcatagtggccttgcctgccacatctataacatatcagctgacccgtcgggcacactccccaatgatgcttcccacaagcatcacactggggcgtctctggcctctgcagcactcctctgcgaccgggcaccctcagccgcttctgagctgtagtcaaatacactcccagctccttgcctgtgcccttctcaactgggtcagaaactctgggtctatctacccgctggcccaccaagaaagtaggctgcttgcctcgacatctgctgagcatagtctcaacttggcgacactgtcacaccaagctgtccatgtctcgagatccactgccggccaccagtacctctatatcccctctaagtccccactggaacttagcagcaaggacatcagcatcaggcatagatctcctgaaataagcatttttggccaactcattaaatctagccaaatactcatccacagtcatgtccccctagactagactgtcaaactctgcctgcttctgctctctagccttcctgggaaagtacttgtccaggaaacaggcctcaaacatctgccaggaaagaacctctccccggcctctcagcagcactactgtggtcatccaccactcatgggcatcgccctgcagcatataggtcacatacagcagcctctggtgatcggaacattccatcacctcaaagatcttctgtgtatcctgcagccaccttgctgctgcaacaggatcatatccaccgtggaaggctggagggtcatgcttgatatgttgcaaacacatcttagttttaggctagttttaggttataatttagataaataattaggaattagaatagaattagttagtttattattatatttgtttttaatctcatatcattaacatttgtgcattttaaggcttaaaagaggagaatcaaggcaaaaggagaagaaaagcaaatccagagtctcgcgcagatcatgccggatcccgcgtgtgtcgcgccatagtgaaaaatgcagagcttcagtcacgaagaaatcacgctatccgcaccaaggtttacgctaaccgcgtcacaagccaaatatcaagggtccaactagaagtgtccgcgccaccagcgtggattctcacgcgacttgcgccatttattcgaagcttcagcgcggatcgcgtagtaccctgcgccagatgcccagtatcagcctcccagctcgaagactccacgctatcagcatggagttccacgctagcagcgccagcctttcgaacaatccgcgcgatctgcgcgagaccccgcgggtcgcgccgcagagattctgtttcctgatttaattttatgtttcgaaattctgcatagttttaggcttggttactctaattaaacttatctataaatacaaagcctctaagactgaataaggatccattcatcatctagagaaacttctacaaatcacattccatcattctaaacctctggaatttaaggatcaaggctagggtttcagcagaatcatgaatcttcaacagctttgttgttcttgaggcctatgtcaggctaaactttgtattgtgggaaggccatgaactgatgtgaactcctctgtaacttactggtattgaatgagaatttcttgattgttttattttactttgttcttcattgttttattcttatttagaattggccattctatttaggtattgagggttagggttcgcaatggggacgttgggattctaatttctgaccttagtaaaatagcagttgttcattacctagggatagggatgtgtaactgcagaacttataatatggtcttttaaatgcttaacttgatagacttcactaaggaattaggttttcaatttagattaaagggttaattcgctaagggattagggattagctgaagtaggaaagatttattctctgaacaatcagaaataagcaaaccgtatgatgtagtcttttatatgcttgataggaattactaaggaattaggattcttgttaaagagttaaattgctaaggaattaggatttactaaaataggaaagatatattatttgagtaggcaaactttgtaaccagttaagtgaaagaggtagaaatcaaaggggattgcgcctgaccacaattgtttctttcattggtaacacttcaatttatttactgcttatttaatttctgtttttatttaaatactcaattaatccacaataattcttcttaaacaatctctgtttttacttccaatcacattgactgaattctactgtaaatttcaccccaatccctgtggaaacgatactctacttacctacttttattacttgaaacgagcggtgcacttgccgtgtgctaatttcgcaacaagtttttggcgccgttgcctgggatcgaactcgggtcacccgcgtgacaggcgggaacatgatttcctccatgataacttgttgcgtatttagatcatcacaatgttctagaaccctctgttagcatccatgtaaatagttaatcgttaaataaaatgctaaaagaaaaaaagtgcaacacagccccaatagaagatgcactatgtcaaatagtctaacctggataactctgcacccataaggatgagtagaaagtgcagctgatgaacatgattgttttaggctgaatgtattggataatttgatttgtgcaggcatgaaaacatgtattgcagcagctggaaatgaagaagatgcagacactgtagcagcaatagattatgcagcaaattatgtagaagagaattcagcagctgcagaaaatttagcagaatgtacagcaaatacagcagcagcaatatttgctgcagaatccagcactgcagataaagaaaacacagttcaattgaatgaacctgtgctagaagagctggagaagaaggaagatgacattccaacaggagcaccaaaagttgaattgaaggaactaccggaacacttgaaatatgtcttcttaggtgagaatgaaacatatccagttataattaacagagggctggaatggcatgaggaagtgaaattgcttaagatactcaaggagcacaagtcagccattggctggtctatttcagacttgaaaggtataaatccctccttctgtactcataaaattctcatggaaagtgatgttaaacctgtaaggcagccacaaagaaggctcaatcccacaatgaaagaagtggtaagaaaagaggttgttaagcttttggatgcaggtatgatatatccaatttcagacacagcttgggtaagtccagtccaaatagttccgaagaagggaggcatgatagtcattcaaaatgacaacaatgacttgattccctcaagaaccatcacgggctagagaatgtgtgttgattaccgaagggtcaatgatgtaacccgaaaacaccactttccacttccgttcatggaccaaatgcttgaatgcttggctggtcatgattattattgtttcctagatggatactctgggtataatcaaatcccagtagcaccggaagaccaagaaaagaccgccttcacatgtccattcggggtgtttgcctatagaagaatgccatttggattgtgtaacgcacctgcaacttttcagagatgcatgctttccatattctctgacatggtagaaagaggccttgaggtatttatggatgatttttctgtttttggcccttgctaacttagctaaagttttaaaaagatgtcaagagacaaatttagttttgaactaggaaaaatgtcatttcatggtaagggaaggtatagtgctaggtcataaaatttctgaaatgggaatagaggtagatagagctaaactgttactaattgagaaatgacctcctcctattaatgtgaatggtgttcgcagttttttaggccatgcaggtttttacagaaggttcatcaaggacttctccaagatttcaaagccattgagccaactgctggagaaggacactgaattctgcttcactgatgcatgtcttgaagcatttaacactttgaagcaaaaactcaccactgcacctgtgttgatagctccttgatagagggtttttagttgaatatttttctatccttcttagcttatttgacctctctttgacctttattttcctattctaattcagtttttgggcctaggcaagtaagtgggcttaattgctaattgttgcgtattttcggatttttggctcacttgacgtatctgacttgtgcagggcctatagggtgctatcgatcttcgaatggatcgttctaggagtccctggaaagataacgaaaatatatacaagttttctacaaatagccctaggccaattctgtcatttagagggtcacttttagctttgaagttagcgcctctgcacttgtaattttgggctgcgaatttgactttcatggttgtaaatagcaaataattagattgttgggcttgtttgtgggccattttattttcagaacttagtcactatatgtattagtgacttagtgaaacttggacaacacacaattcaacaacttttacatttcttttctttattttttaggatcaaaagcttgttcttcattttctctcaagtgttcttcattgttcttcatcttcttcattttcattttgctattcttccatttttctgcactcatttcatggggctttccttggtgatcatcatggaaggctaaatcactaatcaatccaaggatctaactcaagcaagagaagaattggagttccggttcggtatttcggtttctacttgaatattcaccttcttcttcaatttatattatgttttcatgattatgaatgcatttgggattgaaagtgaattaggattatggattcatgtcttaatttcaaatgataatcacaagattaattgaatgacatttcagttagggttgtggtttcaatcaatttaggagtaaaatcgattgaactacttctattgagattgaatgaatgttcatgttagaatcaacttatgggaatgatgatgattcaaatagcttaggttagtgaattggattgatgctttctcatctgttttactttattccttgataatcttgttaatttttgcattgttctttaattttagtttgtgttcttgcatttttactttacgcataccaactgtttgacaaaaacccctcttattattaccaatgatttgaagctagaaccatattgatcatgtctctgagtcgacctaggttagctctgtgctacagaattaagtaaaattgtttttgatgcatctcgacaaagcattatcactcatgattggagtctaccttttgaactcatgtgtgatgctagtatgcagtaggtgcggttttaggacagagaaaagagaagcgcttacatgtcatatattatgctagtaaaatcttaaatgaggcacaagtcaattatgccacaactgaaaaagagattctagctgtagtgtatgctctagacaagtttaggtcatatttagtaggttccaaagtaattgtgtatactgaccacgcagccctgaaatttctgctacacaagcaagatgcaaaaccacgattgttgcgttggatgttgttgttgcaggaatttgatctggaaataagagacaaagctggagttgaaaacaaagtagctgatcacttgtctaggattcaggaaaaagacttgcaagatggaccagaagtcgaaatcaatgaatctttccctgatgagcaagtgttggctgtgcaactcagtccatggtttgctaacatggccaattacaaagctgctggaattatgcctgaagatttcaattggcagcagcggaagaagttcttacatgatgcgagaaggtacttctgggataacccttacttgtattttcaatgcactgacaatgttatccgcagatgtgtagctgaaagtgatgtgctggacattctgtggcactgacattcctctaattatggaggtcattttggagcaaacaggactgcacacaaagtgctgcaatgtggctattactggccaacacttttcaaggattccaagaactttgttgtgcagtgtgatagctgtcagaggacaggtaatatatctcgcagagatgagatgccactgaacaacatcctagaagttgagctgtttgatgtatggggcattgatttcatgggacctttccctaaatcattctccaaccagtacatcttggttgctgtcgattatgtctccaaatgggttgaggcagctgctttacccaccaatgatgccaaggtggtggtctcattcctaaggaagaatatcttcaccagatttggggtgccgagagcgatcataagtgatggagggactcacttctgcaacaagcaatttgacagcttgttggcaaagtatggaatcaaacacaaagtggcaacctcgtatcatcttcaaacaagtggccaagtagagatttccaaccaagaattgaagcgaatattggagaagacagttggaacgtcaagaaaggactgatctagaaggctagatgatgctttatgggcatacagaactgcattcaaaactccgataggtatgtctccttttcagcttgtctatggtaaagcttgtcatctccctattgaacttgaacataaagcattgtgggcaactaagttcttaaattttgaactaacaaaagctaatgaaaagaggttgcttcagttgaatgaattagatgaattcaggttagctacatatgagaatgccagaatatacaaagaaaagacaaagaagtggcatgacaaccaaatccgtccaaaggagtttgttcctagtcaacaagtgctgctttataattctcgcctgcgactctttccaggtaagttgaaatcacgctggtctggaccattccttgtcagaggagtttatccttaaggcacagtggcaatctccccattggatagtgatcgagctttcaaggtaaacgggtatcgattaaaacattattttgggggagatgtggacagaaattcaagttttgttccactcaaagtccctgcggattgaaaggaagtaagcgtctagcttaagacgttaaataagcaaacttttaaggtacatagtattttcagtatgtttaaatttgttagcagtaggtttcttactctgcatactctatggtagtcaagttaggattcatgcatgaatagttaaagtattttaggttctttctaaattttgatagcgtagtattactttgcatgttttccattaatgtcatttttattcagtatttaactttagctattttcataaataaaaaaagcaaagtaaaaagaaaaggaaaagttgttcaaaagtgtcgcgctaaccgcgctgtagctacgaccagttcacgctgatagcgtgaagtctcacgcggaccgtgtgagactttcgagtctatagccttcttctgcataatttcgcgccatatgttcgaaaccaaaaaccttaattttaagatctcacgctactcgcgtggaacacggcgccgatagcgccagttattcgaggctgagggaccttccagctccagttcacgcgattggtgcagggacggcgctagtagcgcgagaaaaccgcatcaattgaactaaaattggttgttcacgcgaatcgcgtgaaatcccgcgctaaccgcgcggagaggccgaaacaaaagaacctccagtgacttacggcgcgggtcgtgccagattccgcgctaaccgcgcggcgtcgcggaaaccatttttaatttgaatttccctcatttgtgccctcactccctcaccttcctaaattgctcccccattttcgccctcaacccaacacctccatcaaacactttccatcatcctcaaccccttaaaagcctacctcacttgcattcctctctctctctcagtccctccattgaccatttcctcaaattctacactcaaacctgcattctttctcggtctagttcttcccctctacatccactttgcattcatcgtatggcaggagaaaaggtaacatcttgcactaagtggctttgcattatgtatgggtatgaacacaaactgataggaacctcatgattgttgccttagagtcattcacaatgagttttgataaagaaccataggataggggatcactgggtacggaaatttcttggtgtttgggtgtaagaattttattattgatctgttcctatggtactcatgttaaattgtcaacaaaaggttatatgacttagtaattggggtgtcatattgattgataaagctgggctcaccaaatgctcaataaattgcctgtgtgtggttatataaactttgttgtgagcacgaagttactgaattgcctattggctcacaaattggtattccttggcatgagaagtttcattagacacattgatttataagggatgcatataattacttgtttggtgcctacacctgtaattaagcttgtattgattttgttcattaaggaatgttgatatgatgaaaataggcataatgaattgaattgattatgtgcccattagatgtttgattaaatgcctaaatgggaatttggagtacaagtaattgctgaaatatgcatcaggcccttcaataatttgaataatattatgtgattcaggtgtagatgaattggtttgatcttagataagaatgtatgattgtgcttaaattagtggcttgtgttggaaaccccatgatgaactgtgctcataaaatggttgttgaatttattatggtaatcttggttttgagtaagtatatttgaaattggattacccacaaatgaaaaccatgatgcttgatcatcaaactctgttttgagcatacttgagataaaaatgaaaggaacatgcctgaactgatctgaatgaattaaatatgcaaattgaaccagtcttgcacttgaaaattgcaacacaggattgataagactgaacagtgagccctaatgatgaatgtgtgatgtatttggtgcttgttttgcgtggataaattaattgttgtttggttaaatggaatgagttggattgtgcactgagacattttgaactaagccttgaccaagtaatgcccaaaatatgggaatggctaagtatggcttaggtcctaagtgaaaatgaaatgcatttgaaccaaaacatgggcactggattgcatatatttgtctgataattgaatgaacttgttagactgtgtccatgatgaatttaagattaaatggttccaactttagagacttgtgttaggctaaatttaggaatccagatgctgctatttattcctctgtcaggctgtgtatattgttccttggttaaactgataagtggagtgtgaattacatgctgttttggtgtctgtaaagtacttaaatctgggaatggaggacccatatcttgcttgcaaataaactaaccaattggactgtgctcttttcctgtcaatatgttttcaattgtggctggtgaaaaattgaattgtatgaaatgactaaatttggttttgatagggtagtatcatgaattaaatctgggaattgttggcttgatctttagtttgaaattgaataagccagatggtgcgtggtttgtgcttttattgtctatataactgataaaattgctgcggactgatttggttaatgctggaaacttgaaatgatatgtgatatgtttccaaacattctaaatctgggaatcatggacatgctgaaccctgctacaggataattgctatttgattcttccagatactttgaatataattgctatttgaactatgcttttattgaacagtactctaaattaattgtggattatttgatctgacccaatgaaaggaacaaatctaggaatgaaaaccattgaattatgcatctatatctggttttgttctgagtttcagggaaaacaagtagccaagggcaagaagaagattactgctgcaataggcagcaagagggctagagtatcaaattatgacgagggtagattcagatccgttgagtgccaggagagatttgacacctggtatctccagaagaaaatgattccagagaaaaaaattatgtgggaagtactgccagaggggaacccggtgcttgaagtgattttgagacgccagtggcagcgattagtcagttttccagagcccagttccagcatgattctgaaggaatttttggccaacgtcaaccccgaaacagtggcacgcagcagagttagttgggtgaggggtgtccacgttccattcgacgagaagactattgagcgatttttggacacccgctatgatccctttgaggggtgcgatttccgccacctatacctgaggatgcagcctgatgccttgacgaagctttacagggacgaggtccctcagcttgctaccaccatccgcagagccatcacaggactttacacagcttggaagcccaaaccaggactcgattacattccagagaagctgaagaagcaagacttggttggagatgcaactttctggcatcagtttgttaaccacacagtcatcccttctaccaacttgactgatgtgaacgtcgagagggccgctctactttacacgcttcgaggtgacggtaacctcctcatttctgatattctttctgataggattcttcatatgatacaggacgccagcagcaagtcctggcttgcacattcctctctaattctgcacctgtgtcgccatgcaggtgtcgaaattgctgacgatgagcccatggacgtcccgatctcatcactcatggtccaaaagacctatttggatgccatggagacagcagctgatgaacagcttctccgagcttcgaagctcaaacctgaggagcttgcaggccgcagtccccgagatgcaccagcaccagatgatcctcagccagcccagccagcagagattccaccaccagttacagctcctcccaccgctcctgcgtacacaccactatatgaggactcaccaagtctcttagcctttcaggagttcatgcacacacagatgaccttacagacgcgcatgtgggaggctgtatgcagacacttaggcatccctccatcggagtaccagattccagcctcactaccagttgcacctgcttcagacattcctagacccttagatgcagcagatacagagccatctactcaggagcctacatccacagatgctgcagtgattgtagagagtagagagggagaaaagtgaacaggacttgttttattttatgttttttgttttttgttttggttttatcttgattatgcactgacattacatacattatgcacatttttacatttctgcacatttatatatatggtacagtttctgattcatactttgcaaataaaaactgtttagatcaatgtttcgagttggatgcgattttccaaataatgttggaatttttccaaagcgttgtgaccttattggttgttgctggggacagcaacttctaaatttgggaatggttgtgtataccgcattatttcacaaatcacagtcaaggaacaaatgacgtctaacagaatttttcaaaaataaaattaaataagcagcacatcagatttttctttagaataaaaagtgaatggactcagcaatggataggatttctctgatgaaagcatgatgaaatgaaacatgacatgaactgcatgatacatgaatgggattatgattgttggtatgtgaaatgcatgttgaagttgaaatgatgcttgaaataagtcaactgagattgacttgagtttgaacacctgtgaggtttgagccaaacagcagtaatgtttctttctcagagataccataatatcagtgtcaaccctcggacactgcatataccagagaggcaccgcccaaacactataccaagtgtaacaccccaaaattttgaatcacaatcaaatattggggtaaaatgttaactagagacagtatagaaggatttaagggaaatgacgaaaatacccttggacattttagaaatgaccaaattgtccctaggcattttcgtaagatatcttaaggaggaaattttataaacactctgggatgcttgaaaaatgatcagaatacccttagggtgacaattacagagtttccttgaacatttttggaaatgacgattttacccctagagtgagaggcaaaattaccaaaatgcccctgggtcaaaactgaccaagatgactttagaaaattgtgggaacctgagtacgggatagaatacctttagccaacacattattaacatgattggggtcagaaaaccctaaacaataatttctaggaattttggaaaatattttgaaaagagctcaatatacactacctcaggtatcagaaaacctcaagaaaataatgaatataatctatggaattttatcttaattatggaaggagtaggtttcctaaatgggttaatttaataattttattaattaggaacaaaatggaccaataagaattcaaataaagctattacatgaaattaagaaaaagaattggttgatggggaattctaaattaagtcttgaccatatgatgcaaaatcaatggaggaaaacttgtagaaaagttaagaatggtcatatggatagataaggagcctagctatttcattggtccaagtagaaagtataccattaaaattttaagaagatttttaaagaaaaactttctcttgactcttttggatacggaggaaattctatgcattatctaaaaaatcccaacggtcaaaagctagacatttaagttaggaatatgcctttaaaattatatgaagatccaacggtgaaccaactcgggatgagtattttattaatacgatttttggagaaaaatcaataaaaaggaaattgctagacttcaagaacaattaagcccaaaggaaaaaagcaaaaactgattggtaatctataccatcaagccacggttaattgcataaaatagcaagctaggatagtcattgagggggaggggaccacgtgaaggaaaacaacacaaaggaagaagctttggtcaacaacacatccaataggaagctaggcaaggaagactaagtcaagaaaggtgggacaagaggaataagcatttaatggaagggaatctcactcaaagagagcaagttacggttgaaacaagaatggaagaccttggcttcataaatgcaagcaaaccgtaggacccaaggagaaggaaaaagcaaatgaagaaaagtctactttactttgattggttgatattaatagttgaaaagtcctcctaagctttcattggctcttcaattgaccttagaattatccaaagatgtgaagaagcaaggcaaggcacggatgacccctaccacttggagcaaaaaaaaacgtgagcaaatttagaaggcaaaggaataaatgctttgtacttgcaaagcttggttggaaggaagtcattggctggtcaattaatgtagacccaagaggataagtttgcattattaaggatgacataagcatggatttatataagggaccgatggaattgaggaaagctacggatgctttcactcaaaataaagccttgtcattttagtaaaacattctcaccctttttcatcaaagtgaccgtgccactcaaagctttctttttctttcaaaaacctcactttcaaatccttttcaaactccatcacaaacaaaatttcaacaagccaattgtgggagatagctacgtggaggaagtgaaggaattcaaggccaaacataaattaacatcctagactaaggtgagggaagttttgatagattaaatttaagtatatgcaaaagttagtattatgatggtttaaaaaggtttaaagggaattgaggaattaagaggccttagaaaaataattaacaagaggattatgttagtgaccttagtaaaaagtaactaaatcaatttaaaacaatttacaagattctaaagaatagttgagaatttagtttatcttctataattattttgattattaacaatttatatgttgttatatttcataaattatgttgtttatatttcatgaattagtttgatatatattcattaaccaagtttatttggaattatgtctttgattttaacttatgttacctctgtatttaggttattgttaacagtggattgtggactatataatttactcatttaatttggtgattagtaaaagattttaattgaattgagtaaaagacttctaatggaattgagtaataaagactatatggaatgatttggacttgataacaaccctgtaatatggtaaaactgtggtggtgactctgtgatgttatgatgataaaactatgatgatatgatggtaaccctgtgatgttgtgataagactgtgacaatgaccctatggtgttgtgacaaactatgatgatgtgataatgatcctatgatgatgaccctgtaacactaaaaagatgactctgtgatgttgaggatgtgatgaaaataaaataataatttataagatataaaatgaaccagtgatgcattttcatgtgcatatacccgatggggtacgagatgatgagatgttaaacctcatgaagagaggtgtcagataactaaactgagtctaggcgttcagctgtgttgttttctgaacttgggggtagttgagacagggaggaccacaccaccatgatgatcacataggtggaggtgacattcctatgcgcccctgggctaccctgactatctggataagttcgttccactaaggtgagggtggggttatctgacagtggccacaaattttaagatgttgctgagatctcagtcatgcatcatataataagataagcatgcattttcttacctgttgtgtatgggaaaggtatgattaatttttaataattgctataatatgttctctgtattttatctaactagtacgtatatttaatatttctgtatctaatatttttgtatatatttaaatttggtttatcatgacttaccctttgttgtgtcttgtggttgacacctgtgatgaccccaaattatttgggcgagcagaggcacagtgaaatggacggtgttgtactagaagatgtagctgttgtgattctctgcttgtgatgatctatatttagttctgtaccatggactatttatatatggactgtggatttatagtggactgtatactatggacatgtgatatctatatctgtgtgaatgaacgttatggattatgttaggtaattacgcgtaaacctttatacgatttgaaaagctgttttaaaaacttaaccaattcaatttgaattttgttattattattattttcgaaaaaaaattgaaaaataaaagcgaaataaaagcggttgtttcaattaccaataaaataaatacgaaatagaagcggtggttacaccaagcattgcctgagtcaccactcaggactttacaccttcagatatggctcatctaagaggctctaggctctaatcccctcgggatgccctctcttagagatacaacatatttgtgtacagtctgggctgggaaagaacctcctttacagggcaatcacatccaggactttccactcgcatgcctgagagagactatccacacagggagctctcaatccctcaggacttccaatcacggtctgagagagactatccacacagggagctctcaatccctcagactatcaaactaccacctgagagagactatccacacagggagctctcaatctttcaggactttctggaactggcctgaggataaccactcaaggctttcatcatcattgcctaaggatgaacatccatatagggcaatcagtccttaggtcttaagcggagagcagtggcacctcccaaagagtatcagccattccaagggagtcctcaaactcttcctctggctagggaacctcaactagcccgatactattccagtatcctatagattccagcctagaccattccatggtctgcatctcctcaaggtcactgaacacttcccagtgttcatccattagaggcccaaggccactcacacctgcaatatcaggtgtttcattaccctcacactgtctcagtgtctatcctagggttcatcatttcagcccagcacacactaggccatcatatatttcaatatatctggaacggtctgagtttcactccaagtaccgttcatcgatcctctcaagctcacaatacatataatcgacaataacaggccaccttggccttcctcatgcaatatatatcagccattgcatggcatattcaaacatcacccacttgggtggcaaacaaaagcaagggaataatcccccagaacgatgagcttacctgatagttgtgcctgcagctccagcccctaaaacaatggtctgcttctctgacacctcgtgtcaagccctaccaaggcaaccaaacgcacatcacagaccatataagcacagaaacatacataagctcatctagcagtcatcagctgcctcaaagaaaggaacctcaatcctttcatcaaccccaagtcatctgacttaaaggttcaaaaggcttatccacacgagactttccatagaccttcagtggtctaacttaaatcatccatggcctcagagtcattccagactcaacacaagccatccataatgagctcagagctctaacaccccaaattcacagggttttcataggcttggacggtctatatcacaagacactgtctccatggccactcaggcacctcaagcccgtcaacaaggctcctgcatgtctcaaaccaagtgactcagttcaagtcacacatgcacaacctaaagccaaaaccaacagtcaccaaatcacaaactgaaagctaatccttcctcctcacctcattctaaagatatctcccaactggacccagagctaattctaacgttatcacagatgggtcactattcacagaaaaccccaaaatcacaaatcaaccgggaaaactcgagtttcttacctcagaactgaagaggaaggcctctgagctactctccttagctttggtgtcgaagaaccattgccgttcctcgtcaaactcgagctttcttcagcctttctctgagttgagcttctctatggttttaatgaatatggaggaaggattctagctcaaaggtgatttctaggagatgaaaagggtttatgaagtgtttggggtgaagaaactaggtcatggaagcttaagaagctctcccatggctgctggaggctctgaggaagaagaaaatggttttcttctcctccaaaatgtgacctcctttaaatactgtctgcaccgacctttccgcgctgaccactctaggtcccacgccatccgcgccagctacagaaactgtggcgccatcagcgtcactcccacgcgaacagcgtggacatgccgaacctgtggcgccatccgcgccacatttggcactggccgcgtggaaaaccagagagaaatggtattccaggccacttctggcgcgacccgcgcggcccttggcgctacccgagccacacctacaccctagcgctatccgcattttgggtcaagaatgaaggggtatgaagcttggaagcttcaacaatggaggaaagcagctgggaggaagaaggagaaggtttttcgtccaaaaacgcgtgaatgagcatttatacctgccccgtcaaaggtccagcgctgatcgcgccacctctggcgctaaccgcaccaagctccctgtgcctgtggcgctaaccgcgccactctggcgctagccgcgccaaactcccttgtacctgtggtgctaaccgtgccacatctggcgctgacctcgctgaaaactagaggaatttgcttttctaggctacttctggcgccacccgcaccacctatggcactacccgcgccagaatccagagaaaacagcttttttagggcactagtggcgctgaccgcatcacccatggcgctgatcgcgccgtaccccaagaggaatgaccctctggaactcattggcgctgatcgcgccactatggcgctactcacgccatccctcaaatgcctagcgctactcgcgctacactagcgctgattacgctagactccagggtcctcacacttaacaacttaggaatatcaagatcgacatccttcaagaccatatttataatttcatttagtattcttcctcaagatgcttttaagggagtatattcatcgtatttcaatctagctttgtaagtagatctctcgtccgacttaggccattttccatttttcatttgtgccacacctttttgcgtactttgattttcttccattttcaatttttcgacctccaaaacattttcgtacttaatgtatttttcatccttttttaagaattcctctaaggtgttaggtggcattttggagatggatatgaagaaaggagatccttccttcacactatcctttgccagcaatagcacgactcctggctgtgggaacttcatagttaagcatgcttgacttggagtagttacgggatgggtaatcttttgggaagtttcctgaaaagcgtgtgagttaggacaaagcatgctaagaaagcctcgtgttgttttgtgggaacaatcattgatcctgaaagcagccaaagcaaattgtcgaggtctccaaaaggatacctactgagggttctgaccattggagggttttgaccaaagagaagttgaataaagtgttaccatgtgaaatgtcatcgtgtgaaagtcgtcgagaaatcgacaatcaggggcgttacaaatggtatcagagtcgacctctctcctagcatagtgtgattagaggatgaactaggcagaagctgatgggcatgtaacaccccaacgaatcactctagaaagagaggaatccagaggctatgcaggtatgagattgtacaattaaggatgacttaaaggaattaattggtactacctataccaacaagatgcatatactttttggtagccagttacttaagaatttcatattaagtgtgctggcttggaatagttatgagataggtgaccttctggaaagttttccagaaagcgtgtgagtgaggaaaaaacacgttgaaaagccttgtgttagtttgtgggaacattcattgattctaaaagtaaccacaacagattgtcaaggtctcagaaaatggttactacagagggttttgaccgatggagggttctgaccaacgagaagttgagtgaagtgccacaatgtgaagtgtcgtaatgtgagagtcgtcgagaagtcgacaattaggggtgttatattctcgacagaagatattgaaatcactttagtgtcctagatttcaaagacaacgggaacatgcatgaaataaattgagagaaaaggagaaaatcatagataatttagaaagggtaagagaaagacttttaggatctcgtagtattaagttatgttgggtgaatataaaatatatatttatagtgtttgcttatgtgatgttatcagtcacgtggtttattactagtatttgcattaaatatcatattataaaaggctatatcaaacttatcctaagtcgattgttagcaagatgcttcttggttcatctagatgtcaagtttatatccgacttatgatctttaagtcattcatcatgtattaggatgtgcgccacatgcttgtgacatgtggagttgatgtttactccgaaataacttcgatttagaaaaaaaaaaagactcaaaataaatatactatgttcacaaaacttaaacttatttcaagattaatccaatattgtattttacgacttttaactattgagatgcaacaaataaaaatgtcaaatatgtgacttcatattttaaaattagctacaataaaagaaaataaattgatttgatatttataaaaaataataaaaatcaataattttttaaatacaatgccaacttaaaatatttttctttataatgttttaaataaatataataaattcttaaataacccacaacaatctatatgtgtatatatatttagatttacacagtattactaacaaataatataacaaaaatattacccaataattcaaattaattttttaagaatataaaaacattaaaagcttgaatgggcccacggcggctgccttctcctgctgatggaattcgcttccaacactgtaattcatcttgcgcaataatcatccaacaaagtactcgttctaccactatatttgtctgaaattccaactccttgaagattcatcatgaccggggacggattcaccagtgaatctatttatatatactttctttattaatattttttaaattttaatttttcttttttatatataaataaataaataaaaggtcctaaaggagggagtcaagacccctacttgtcttcctagttatatatatagagtcctaagagagagggactcaagaccctgctcatccgctcttgaatccgttcccaatcatgattgaatatcttctttaagaaaaataatcaaacatccaattttttaattcatactcatcattttttttttatctttttctaacacatcatattatcactaatatttatattttctcttttttctctctttcactaaaagttgatttgattgatggaaagacaataaatgaaaaaaaattgaaaaaaaaaataaagtagtctattaaaggtatgaaaaccatattttttttttaaaattcttcttttctctcttcttctcaaccaaaattccctttaagtgcatagatgttatttcccctttaaaaatatactaatctgccatcaccagttaataaggtttttaacttggtcaatggtcattatcaccagttaataaggtttttaacttggtctaatggtctaaatgaccattgaccaaaggcactttgctacatttaatttgctcaatcatatcatgcaataattgcacatgggaaccaattaactttgcaagggaattgaaacggaaaataacgtcttagaagcgtcaccatagtataatacagaattgaaaatgttgtatgcttactaaagaatcattttgagaacaaataagatataccaaataccgttgacgtaacttacatgcatccttaacgaaccaaaacaaagaaaaacatccatctgtttttctcccgttcccatgtccttctaagactaaaacacaagaacacaacttggacattcgtttatttcactctaagctaacttctaaacacaaatttgttcttaccactcataagtagcaccaatttgtcagcactaacttgtaattatacaaaaaaaattaaaaaaaataaatcaaatcaatcaaaaggggctccaaaaaccttgcctattatcatttccatgcatcattttcccttgctctaaattttaaacttcatccacggctataactatgtccctgctagtaccatacttgtaactagtttcaaacttccttcgtagtcataattggagtctgtcacgtgcctattagccgagataggtaattttctgaatcatgtggccggaggatttggaataacatatgtatgaggtcttagattcaaactttagtgtagtcattgtacattaaattcaccttctctcacaacaatatatgcaactcaaccccaccaacacctccacaatggccgcctccgccttctctaagtcggagtaatgcagtgtctgcagcagcagcgccgttgtctttgcctcaaacctcgccgcctccatgctcctctcagccagccaccgcaccgtgtcgtgcgccaccggcgacagccactccaacatctcctccaccgcgtcccgccacccctcagccagcgcctcctccctcctccaccgccccctcagcttcgccgcaaccttttgcctcaccctctccggcaacatctcgtaaaacccctcccgcgcgtcctctgccactgtttccggcgtttgcagccaccgttccgcctccaaaaccacccccgcatacctcgctgcaagccccgccccgcccaccgtcgacggcggcgccagcctcaaaaccctattattaacattactcattggcctatcaacgtcacggttcaagaaccgtatcacaccggttttgttgttattactagccttcggaattggaccggatcttgtgacacgcttctgaagtgattcctcgtagagacaataatttttcttgtacaactcgcggtgttccaagaggcaacaacaattgttgtttttgtcgttgtcgtcatcattgatttcatagcagtcgcaattagaaatgtagcctccaaaaacggaacatatcctagcgtagacaatgcaaaccaccttagccatgatcccaacggttttgtccaatgtttggctccatagtgaaacttccttgtaatgctgcacttgttttctttgatacgctatctgctcgttcaagtactccatgttgttttgttttgggttgttgttgttataattagtgggtcccataactgtcttcaatctttgtctcttcttctcaaaagcctcgagttccatcatgcactgcatggcggaatggagacttctggtagaagagacaaacttctcaattttggagatgatcttcgtggtgttgcgagtaccgtaactcaacttccgaaggtcgatgaggccaagcttgaggtcggcgtagacaaggtcgaaccggctgaggctcgggtcggagcatttccggccaagccgtgagacagtgtcggctgccatgtcgagctcctcgaggcgctctgccgcagcgaggttgagaaggaagcattcatgttgggaattcaagtatgttacccctttggatttgatcacctctttgcgaagcttgatgatttcttcgcccgagagggagtggtagagcgaaatgaggtggcacatggtttttccggcctcgaaggcaaggatgccgagggtgttagcccccggaaccaccgccttctgacgccatctcatggtggcaactaccatgatcacaagctttctttaacttgccaaagttactttgctttatttgtttctcttttccctctctatatcactagcattcactgtttctcttttgtgtatgtctttatgattattgactaattggaaatggactttggatttttcaaggttgagaattttggaagaaaagggttaatttatatagagtgtgatctaatgttttgaatattgaatattccataggacgcgtttggacagtgcgaactgcggattcattaggataattaattaatgaattaaagacgtttttggatatgattgatccttttgattgtgcttgctacttactaccgccaaatgcgatattatgatattacagtttgttctttgtcccgaagtcaatttttccgtcacacaacacacatattctatctgggtttttttttttttttttctcttcttttttctctgttgtttaatatagaataatggggtaaggaggtggaaattgaaaaaaagttttatttttttttatttgttgatatggttcaatcataagattatgtacacattacagatagtgaagtgtatacgcgttaagtgatttaatttatgtacatgctagtgttagagtcacgtaacataagagaccaagttggtcttacgtagctatacttgaactgaaagttgaatgtagaaatgtttttttaatgaaaaaatatattggttatgttgtggaaaaataacttaaaagtaaaaaaaaaatatcaagttaacttatgaattaaaattattggataaaattagttaataagtaacaattgaatataaaatgatgtatttatattattttatggactaatataattttagacaattttagttttatgcgttgattttgaatattcttcttatttttgtttaaagtgaataattcattgaatacacaaagtatcaagtgattagtaaactgggtattgtgaaggttcacgttctcccatatatctaggttatattcccttccctcgcacatagttcttgttaactgaaatttgccactatatatatattatatgcaacttcagcgaaggtttcgtaggaatctgatgcttaaaaaagaaaccacatataaaactattgtaggattgttagtgtgcactttttctaactgtatccttgaagaatctttatcaaaatgaatttcttctcgtcaattaacttgttcctcaatgctatccttattaaaatagattccgtagcacattgatattgtggtagcctcaacacagccatgaagttagttcataacaaatgtccttaaaagttcaagcaacttcagtattatacgttgtcatcagcaagctccgtattgccaatgtcaactttaagttatttttcatgacacattctaacacatgttctcatatgttcgtatttgacatgtgctcatcaatgaaatttaatttctatatattcctacgtataatattgtatgtacacataacgaatgaaagtttaagtttgaatcttagaagaaagagatactaacacttaactttggacactagtaggcatgtatcaaacagaattattttcgaaggaaaatacttttagtaaaaaaaaaaaacaatatatatatatattaaacggttacttatgcaaaaaaaaatattaaagcatattattgagttcgtcgttttctttcacactataaaatggtaatgaaaacatgttatatatatatatatatatatatatatatatatatatatatattaaacggttatttatgcaaaaaaaaaaaaatactaaagcatattattgagttcgtcgttttctttcacactagaaaatggtaatgaaaacatgttatacgggatacctaaccgtatgttcaatgacggttaaggagagacatcttccgaaatgtttctttgtggattttgggtcaaattttgggtcaaatccatgctttatatatatatatatatatatatatatatatatatatatatatatatatatatatatatataaagatgcacccttcaaattcacgttatcatgtgaaggaaaatatagacaattcaaatgaatttagatggcttctaagaatttagctggcaagaccataatattagaagctgggacacacgcggtgtcgcgggcaaaaagatcaaggatgacggtaagatagaacgaaaaaagatagaattaaaaatcaatatcaaacacgttttcaaacttataaaaactgaaaaatagaaatagatttttaatttttttctaaatgaaaatggaaatgtttctgcaaattaaaaaagtgcttaaattgtttgaatatgttttcgttttcgtagttaaaataaatttaagaaaagtgaggggaaaaaagttatatagcgcgttttgttatactttttacatattattccaatataatatggtcaatttttaagtttgttaaatatacaaataaagacatatcaacataacattaatatggaagtacgatattctaactgtttggcttttctgtatgtaacttgctttgtggcttagcaacgaatctcctaggaaagcttcactagtagtgcgcaatgaaagagccacgtacgttgcactctcaccgtaatacacagggtgagaacacgaattgcgatttgactacaccacctgcgatttaataaataggtggtgcaatcgtttaattatttgagcatacaaaacaacatcccatcaacaaaaacacgtaagtatagtctgcatcttcctttttggtgttttctaatagctaccaatccatcttgaacaatcatctaataaaagatagttagaaattatctaagaattaattatttttaaggataaattagtctacagatatatgaatgaattatttaataatttttaattatatcattttaattgaattcttaatttaatatttatttttaattgattttttccatttaactgtcgttacaaaaagttaatcagagaacctaattagtcattgaattcagattgggcacatgggcacatttgtaggtatgtactgattattctcccatatccttactgatattttcaactttgcaggttctaaacctaacatttttatacaactcagactcacaaatttattgaacaaatgctcgaaaaagcgaatgatcaagaactgacacacaacattggcccaagaaggcatcgacaactaagtaaactactcaaccggtcgaatggggaatcaatcatcttaaataacaaaaacaagaaagtttatcctcatgcccaatagataagaaaatatatataaatatcctatctttatctcatgattatagtcactcttattaacacttatatgaggtaaccaggcctatgggtccaaaagtctctatttatcttctctaaaggcacgaggtaatccaatctaatttctaaccctaatcttgatacctacctttttacctttgtatcacactaacttaagcgtcaaagcctattacaaacctggttaattgcatgtttggatgaatttcctctcctaatcatattttttttatcatcaatactccaatttgaaaccttatttaaggattgatttcaatatctttcggaccaacgacttttagatatatatatatatatatatattgtatatataagtatattataaagaaaatgaaaaagttattgacaatataaatttataattattattaataattataattcattatatctttcaaaaaagtataatataaggattattaaaaaaatggttgttgaagtataattatatttcacaatttctttactaaaatacataaaaaaaaatattatataaaaataacaagttatcttattattttttctacaaaatatttaaaataaaaataaaaaacttaaaacaaaacaattttataaaatacttatgtaaaatttttacagttaggagttagttaaaagtcagttaacacggttggattgaagttacttgagattgttacatagaataaacttggatgtgtagatggtttgatttctcacgaccaagtgcaacagattcaagctttgcatctttggaatcacaacaataacattcttgctttgtggcttctcaaatatatttcaaaggagattagtgcgagtgtaaccattccttcctttgtgatttggattgattgcaatatccctttatctagaaaatggctcacacatcttccagttgaaggaaggaatcctaaatcgtggttaaggatccaacactatcacttagtacttcattgaattcaaggccttatgggaaaaacttggtgagtaagttaagacttctgcacaaattccactaggtggacttaaaccattggttgatcatttctaaaaagaacatgacatcaccttcttgataggatccaatgagtcttttgctcttaccagaggttaattgttattatggatcatattcctgctattgccaaggtcttctccttgctcattcaagatgagaaacatcaagaagtggtgtttaaaccgcatccacatctatcgaaattgattatgttgtttaatcaaactcaactaagtccgagattacaaagaaagataaacccttatgtgcatattgtggaatttctgtgcatactataatctggagtggattagaaggtcactagaagagagctagaatagaaacacttaactaattatacctttttctacaaaaaaaaaaaaaaaaaaacaacttttgatgttctaagaatatatcagagtttaatttcaacaagctttgttgagagcaatgcttatccttcggtagtactttgtataaaaataatcttctagtaaaatctttacaaagatatcagcgtatacggcttgagaagctacttaaaaaatatcaaaccccgagtagtgtagagtctgtttttatcttttatacaaatgagtagaggttgcttctaaacttagaaaacaaattgagaaaacttcttatgatcttatatcaaagatatgacattgtaaagcatgtttcttaaaataaaagatataaaagcaacaaatcaaaagaaataaaaatgataaaaacacacccaaagtatatactggttcacccacaactttgggctacatccagtccctacacttgtaggattttcactaacacaagcatcgattgtggtattttttcttttttgaagcctttataggctctttcacaagtattccccaagccttgcagactctcttgtgtattttttcaaagagtctcttcaggcctagggaacacaatcatcaaaatacaactggtgctagttgtcactacagctgtaataatagtataagatgcttcttggaaaataaaaagataaaaaatcttctagtggtcacaaagattacagaggtgaaaggtctctaaacatggaaggaggtctcattttgtttaggccttttggggtgtcagaattcggacttacaccgacgatactccctgcttgggagcacaatagggcttggtgggaaatcaatactgtaacaccctcagatttcaatatatctgtgcattttctgatgaatctgcattcctaaaataaatgacataaatacccctggacatttttgaaaatgactaaaatgtccttgaacaatttcacaaatgacagttaggtccctagagtaaaagactaaaatgcccctgaacatttacccaaatgaccaaaatatccttttagctctgatgaagccagaaaatctcagtaaggttatggaagcctgacaaaagtctagtatgctcctaaataggaaattagtgacatttttttagtaaagaaaattatgaaatggaagttttagaaattttaaaaaataactcagaaaaattagaatagagactaatctgagtttaataaaacacagaaaaaggaaaggtgcaatctaggaatttttctcttaatcatgaaagaaatggatccttaaataagtatctagttaattttactaaattaagaacaagatgaaccaatagaaatttagaaaaagttattaaagaaagttaagaaacattccaaaaattgttactaaaaacttaagctagttttaattaattttagaaattttacttccaagaaaacaaatttaatctaggctaccataaattataatactttgatcaatataggataatatgataagagaaacagaagtattaaaaacctataaaattctagctattccaattccacggttttaaaacaaaaattaaacataatttgcttcataacactcaaagtaaccgtgcactacacaaaaataaggtagaaaactttagaatagtgtggaaggagaccacttggacggttgagagggaataagaaagcttattggaccaactaaaaaggtaaggaatgatgaagccttgggatatttcttttacaagccaaatgattgaatataaaaaaagcaaagtggaccaaagtggggagaaaacttcacggacagcaaccccaccattcagcctctctttttcaatctctttcactcaaaataaaaaagcaaaacagcagcccacactttgaagagttcacgtgaacaaagcttaggaattttgaagaaaagtagcttaaattcaaacaaagacaagcaaggtatgggaagtgttttaataaacatgaattagatggctgatttaattaatttaacacttaattctctaggattaaagccatgttttttccttgtttaaataaaatcaaaaattgggcatagtaagtgttcaattaaaattcacaataaactagtagaataaccttaaataaagtggttgtccaatataattaattttcctttgtggctatatcctttactaattacttgatgttgtaattaattttttaaggttgctgaaagtcattaagttattgtatattattgaatctggaattttatgttgctgtatgttaattaggttgctgtatattgatgatgttggctgttttatgttgctgtctaaatttttattttgctgtctgtaatcttatgttgctgttattttgttgtctcttattttatgttgttgtatgatattttattttattgttgtctgttaagatgttatattgctgtatattaattttgtactttgataattgctatatgttgttgttgtatgttgtggtgttgtaactaaggtgctgtatgttattttattactcacttaatattgagctatgataaagtttctatgatttattttattagaaattgggtcttggatatataatttaaaaatttatattatgatgtatcttatcaagatggctttccttaaaaaaaaaaaattatggtgcacttataacttgattattgaatcaattttgatgagcaaataaagattttggcaccaaacttataagaaattgagaaacaaagtaataaaaaaaaataaacaaattcatgcatcatttgtaattgacccttagagtggagggaagtttcactagagtgggtgaaactattgtggtacccttttaccctcaaagtggagggaagtttcactagagtgggtgaaactctttaattataaccctgagagtggagggaagtttcactagagtgggtggaactattttgtttatggtacccggtggtaataagttgagatctcagtcatgcatcatttaataaagaaagcatgcatcattcaccatacatctgtttataattgttatttgcttcgattatttatctgtttctgtttctgtcaaattagctaatcatgtttattaaatacttacccgagttgtgtctgtggttgacacgggtgatgaccccaatttatttgggtgagcagaagaacagtgagctgaggaaagaattaaggaagaagctggatgttctatgtgctgttggatgactgtatgttttatttgtgattttctgtttgtttgtatttgatactatgctatgctgtatgtatctgatgtttaaacagactatttgggactgcgttgtatccggactgtatcttaaattatatttgaaccgtatattttgaaaattttgcggacgcgttagaaaaataaattattacgtataattaattttacgcaaacaaaattacgtagaaaaaattttctgtaaaatcaacaagcataatcaattaaatacgaataagaaacgtagtcgttataaatactcctcggtttaataaggtcattgacctcaatgaccaaagaaggatctggaagttgaggtggcacaagtgtgtttgtttccaacgacggagatgagcttgaggagggaagcacacagatcacatgtcgattttgcaacgaatttttcgcgtggttagctaaaggtgagtggctgctagagttaagcattgacttgatttccttgttgggtgttatggtaagtggaactaagctatttagtttcacttcccaagtgcaaaaaagttggtcttttattgtagatgaaggttgaacccaatgcttccatttctaaaagaatttcaagatctccatcattgggacatgcttccggtggtatgattgtcatggtttgtggagaaggcccaacatattagcggaaaagggacacatttaatattggatgaagccttgtagagggagacaagttgaggaagtaagaaaattctttgacgcggtgctgaacttggaaaggctcaaggtagtgggaaacagcttcttagaaggtcctctgactcacctctttgggcttctattgaatcgagaaataggtttaattagtccattttttttatagaatatctatagttttttggtgctaagctctaagtttcaaccaaacccagtctccgacttcacactacacatctcgacaatgtttgttagcctgagctatcattcgttgttgtgttcacgtagatttgctttgattatggaattgatagttatgtgtgtttgcaggtctttacccactttggccatatttgaggttcctgaaagataattaggaaatgacgatagtatcttatcggtgtcattccaatagctttgttgttaacactttggtaagcgtaccagtttgtccaagtagtaataaaatgataaatccgagtgtcgagtccacaaggactttgactatactcagtgattgtaaacatctaattctaagcaattaatgaattaaattgatttttacattataaaatggcatataattaaattcaacataatttaaactatgaaacagaacaagtgcaagggaaaagatacaaacactcgaagggttgcagtgatggttgatgcaggatgcgaagtatgttgaaggctcaactaaccgaaactacccttgatgcaatataaaagatttttcgctatttaacattattttcatattaccttcatctactaatctactttaaccatgattcctcgagtgaaagagcccaaaccacctaattttactcctaataacttaagagctacattaaacgatttgcattaagaataaagacgaatactttaggctaaataaaaccattctatccctagaaatgacttacttagatgttctttttagtacttaggaaataaacactttccaatgcataaaatctaaaacaaaacatgagcatggatgattaaaccataaacatgacaataaaattagaaaagcaacaataacatgaagataatatcaaatacatagttagaatcattacatcaagagtgtttggttgttgagatcccaacaataggtagttgagcctctcattgtcatgagaggcttacaaaacaataggaagcacaagactaatgaagggaaatggaagaaaatggagaacaaaatggtgagatgcaagctccaaggatgtggaagaagccttccttgtgacctagcttcttcttttgctttcgttctgaatgcatttgtttccctcctctttttccttaaaacgcaacccaacttgtgtttttttttacgtgtccatgcgctgagctggcaatggcgcactaagtgcgcctgtagagtccagttggataagtggtcaagcactaagtgagctggtcgtgttgagtgagcttggtgtgctaagcgggttggtcgtgctgagcgcgatgcttcagaccctcaatccaccttccatgtctttgctgtaaatttctacaaaaatacaatcaacacactataaatcaactaattttagaatctgctggataaaaactcagaagaagctaaattcctatgttttaatcacaaaaagaagcatcaaaagaggaaaaataagataattgttatgtgatttacatgtaactttatgtatacgtagcaattatcaactgtgaagagtagtattgtactaatactcagccaagtgcaaaaagataaaccatttttttggattttctcttgcaaaacattttgactatgcaccaatggatttgtttactaactcaatttgcctgctagttttagggaggtaggttaaggaaaacttgagtttggtgccctgatggctgaagagcgctcgtcataattggctaatgaaaacccaatctctgtaagagacaatagaatgaaggatcccacataagcgacatatttctactacaatctatttttcaagctaaaaccaatgaattttgttgacagagcaatgagacttttcacaatcctagttgttatactaaaacaccaacatcaccatatgaatgtgaattatatgataatgaaaagaatctaattcaattacataattaatagtatttcatacttcaacaattaagacatatacatatatcaccactttaacagtatatcaatctcaacaataaatagtcgtttctcatctttaaaggtaaatagaaacttataaacacatggtgcatcaacctcaattttttttcaaagccatacaacatcaatattcctttccatgctccaacacattcattaactacattctaaggcactatcaagtcattgcattcacaagcattaataaaaacataacacttctttttccttatagatagcacttagcatagaaatattttacgcttagccctaaaggtctagagactcatcatttgcaaaaaacttagcatagaagcattttgcgctaagcacaaaagtttgacagcgaaacaaaagttgcagtttttctacaaaacttgggattccactttcccaaatcgacctaaacatcaactacacaaaaaaaagaggtttaagattggttccttacatgtttctaaacaattttaaacccataatttcataatcccaacacaaaagcatccaaacctcattcaatcacgaatactcaaatccctaattttcaagatcatgaaaagaggcaaagcttcccttacctccacagatcaaagatctaactttgagaaggagaaactgaaaagaagaaggctttggatccaagatgagggttttcctctagcctaacaacaacacacaccaagcaacaacacccaaaccccataaacaagtaaaatcaacatcagaacctcatctatgagcacttttatgagttcccaaagattttcatgggaggaaagcaaaaaatggaagatgagatgaggggaaagatgagagtttccttaccacaaaactatcccacaagttgaaagaaacttagccacatggtcccttgagcaagggaaatcaaggcctcaagctcttcaatgaagggtcatcttgaagaggaagaaggtgaaaaacaataggaatacccacaataaccaagaggggggtgaattggtttaaacttggcgttttaaaacttttaagaaaatcagagttataggatcttaatcacaatagaaccaagaatacttcaaatcaatcaaaccactcagcccaagaaaataattgataaaaacagaacttgttgagtaatgaagataactcaaagaatcaatggtcaagataacaagtagaaattaaggaatagaaaacagcacaagaatttacaccggttcatttctcaagagaagttacatccaatttcttctaatcaactttagattagagttccactattatcaattccagttcttacaagctttacaacaatcactccttatcaaacctagataaagaacaaaaatctaagaccctattagattcctaatgatcaagacatagagaacctttctctactcttccttctaaagaaactcattctagaaaaagcttaaagaaccctttacaataatttcaaactatcaagaatacaaaaaggaatttacaatatgagataatggagagagacaacatgatgatccaacgattatgaatgaatatggtttaccaatcagagttgaaatgcagaaatcaaattcaaaactttctctctaaaatatctttgaaaatcttgcccaagaaatctttcaatacaccatgaagattaaagagtgggacaagaactttgctaactcagaaaatcctttctaactttgagagtgcttgtgtatgctcaaaaaaatcaaagtctataagttaagttttcagacaagccttcaatctatttataacaaacttttataacagaatgtaatcgattaaagcgccaagtaatcgattaaattatcatattaatcgattaaattgtcaaataatcaattaaaatgttcatagctcattctggaaacttgcaacgagcaaagtaatcaattaatctgaggcgtagtcgattaaagcatacaggtttagttttgaaacaggcttgtgtaatcgattacgtattgtggtaatcgattaaagcagatgggcacaattccagaatatacttatgtaatcgattacaaaatatggtaattgattaagtcattcaagtacataaaaaatgaacttcagttttcgattatgattcatggtaatcgattaaaataggaaaacatgattttcattttatgctatgtaatcgattacagtagcatggtaatcgattaaaatgtttttcatgacttttccagaattaaaaaagaagcttgtaatcgattaattcgttgtgtaatcgattaaagcagtagaatttcgtttttccaaaaacttaactatgagaatttcatttcttttgaaaacatgaatagctttaatgctttaatgaaatcatgtatgcaagttaatgatcatgttcatgcaatgcaagaatcataagattagcctctcatacgcttgatcaaattaaaaattccttggcatgtgaaaaactcaaaactttcttctaagatacaagtttcttctttgactttatcttgttgctactccccctatatccaacagaagggagtgaaaatgagagtgttttagaattggttaagatttatgaaaggtttgtgagggttatatgactatctttctaacttctctcttttcacacctcatactttactaaactcgtccacccgtatttcataacccaagacccatccaattaaatccaacactataaaaactcatcaaaacacacatacaataagacatatacacaaacacagacataaacataaaaaaccatcatctcatgattaattaattaattaattacgaacacttaaaatttaatttaattactcttttaatctaattaaaaatacttaattagcattatgaaaaaaaaataatgttatactattcatgatgttgcaaaggaaaatcattcatcaaaagatggtttcctcgtgacaataaatcatcatcctctaagcggtgttctttacaaaaatagcattttaaaagttttagttaacacatcattatttaactgataccagagacaaatgaacaaaatttttaatataacaggtatttaacatagaaaaagtttatttgggattcaaaacaaattttactaatttatcaagaacttaaaatatattttagttaaaattttctaatcccttaacacacgtcatcagtaactcaagtgctcgcacgatacatttaatagacacatcagcaaaaaaacgaatacccactacccactaataataggaactcaaagaaaaacttttaatacattgaagatgcataataatcaaaaaatttagctagaggatttatttgaggtgcagtatatgttattccaaattttatttgagagagttccatgaacgatcaataatggtccttaattagttttagacttctacgtacgaaacaaggtgtgaacacgagaagtctggcaacatggcatcttattcaggttgtttttacgtgtgacattgactgggaaggaacaatattgatggtttcggatgagtcttttatggtattgtgtgttggttttttcatgaattagtggtttctagtcaatggtcgtgtggcctctctcacaagggcctgtcaacgtagcgtgtcaaactcactcaaatctttttcttttctaattaaaattcatatcaattcagtttcacactgcaaaagttggtatatttcgttgtctgcaaatctaatctaatatacctatataaaaataaattactagcaaaattacaaaaatagacagcttaatattaatgatactttgcaaaaaaaaaaaaaaggattaaaatggtaattgcatccccttgttgataactgcactctaatatttcaaaattaaaacttcctaattgcaccttctatttcatatgtgcattccaatactttcaaattaaaatttgctaattacactacctttttgataagtagaaatttgttaagtgcactgatttcctttcattttatgttatgattttcacaatctcctagttggggtctttcatatttcttaatattgttagttctcatctcaattaactgagtctaatttaagacttgatttcaacataggtgtattatcacaagaagaaaaattattattgaacttcacttctttctttctcttattaatttacttgacaattgtctagagtgcaatggtcttctttcattttatgttatgattttcacaattttctcctttgagctcttcatatttttcaatattgttggttctcacctcaattagctaagtctaattattggcaggtttgcacatacatgacaaaagatggaatcttaagtggatcaattgtttatggcctgatttcaacaaagatatattatcacaagaagaaaaaattattttttaacttcaattctaccttctcttatttttactacacatctattttgtcattaataaactatgctagatcttgtagtttttttaaatatctttttagcctagacgatatgttgtcttaactatctttttaagagttatgtatgttcaaatatcttccttatcatcttttcttttttctcaactctggaacgttattcttttctgatgttttttgtcttctcaccatttttctctcttctcttaccttcttcattcactcaatttatttgctctctcttctaaaaataaaccagtgaaatatctttttacttctcagttaaccgttcaacatcgcaaccttcgctgaagattcctttgtcagctactatgactacaacttcttcataattgtttcatgatttatagtgatctgtagcaacaaagatgaccaattttcttagtttctattttcttggttgattttggtttggcctaattactttctttgtttttttctcattcatcaaaatttctctaatattgtgaatatggactaaatttgtttaataggtttatttgatatgacctatgagtgagttaaaatattttatggaaaaagatactaaacaggcctttattagaatatatgagaattggagaattttttaaatatttatttgattttattctagaatgatttatttgttgcaaattatgtgtttgatcaaatgtcaaaatgacatttttgggtatgttttcttatttatcattttacttttaaatttaggacactgttgagactactttttacatgaaaacttttcaattgattccttcggtttgatattatcttataaagtgagaattttcacatacaatctttggttgttgttgcttatcttttgttaatattactcctatttataataaatagttaaattatatttgtttaaaaaaagttagtaaatgaaaactgatatttattgcagaaatttaggtgaacgggtaaaggatcaatgaaatgttcaattatgaaatttgatgtaggacttctataaaagttagcattgacacaaacagaagtgaataaaagttatctagttgatgattgagtagaagatgaaggttcagagtagagaaaagatacgggacaaaatggagagaaataaatgtattacttgggtaaattgaaagagaagaccaaaacaagttagaggtttactagcataatattaatttgcataaaattttcagttgttttctttagtttaagttcataactaaaagttgcttgctacatgttacaattcttgcttagattgaaaattattattattgttccaagctaattttttcattttttctatccatcttatgtttttatcttatagtgattatatgaattgaaattctaacagattctctatcagccatacattagtcatgttccactcaaattatttaagttttcaatctttttgaaattgttgtgacccatcagttacatttatagacaatattctatttatagcataaaattttgtaagatattaacaaatttgttaaaaagtactacattacaaattgatcgtcaagtgcctacaattatattacattacatctatatacctattgttattaaataatctttttttattatacttgcaaaatgaatgctaagatatatttatattacacacaacaaacataatttcttattcctattataaattcatatttttcttcatttctaaaatatttatatgtttacttattataaaattagtttttcaatttaaagcagagcgaaacgcaacaaatcgtacatcccgtgtgaatgcacgggttatcgactagtattggataaagatgtgggttccttatcattttgtgtgtctcaataacatattgcatgtaacgggggccacactgaaataataaaaatcttaatagaaaacttggcttatatttggattaatagaaagagatgaagtataattgaatgaaatgaaatgaatttattttattatattttatgatagaatgaaataaatcttttgttccatttcatttttcaaggagagaaataaattccacttatttttattatatttcatttttattttaatatctataaattcttttatttacttttaatatttaaaaaattaaaaaaatgtgcttttatggatttgtataattcacctcaaataaaaatggggttaaacaactccatattcaataatcaataaaattcagacaaaatgtatttttctaaaatttcatcattaatattatgattatcacattcatataatgcaacatctttagtttttcttccctatcattcatgtataaaataaaaactttatatttttaattaaaattataaaatattaaaatcctaataattatttttaattcactttaggtaaatagttaatataaaaaagaactttaggtaaattgttttcatttattttacaacttctacagtataatactttaaatatttttccaaaatatttattataatttttaattaaaaattatagataaagagtataaatttttattaaaatttaaagataaaaattataaaaaataaatttaccaccatatatacttatcctaaggcgaataaagaatataatgattaaaaaaatacttattgattttattattttataattttatttatttatttttaattaatattttatatatttttaattttacacataaatgatatgaaagagaaattaaagatgaaaattaaatgtaataatcatgccattaatgattgaattcaacataagataattgtctaaatttttttaatattgaatatgagattatttaatttcatacttgaagtcagttagagaaattcattatagaaattaaaagaaaaaatatcatatttttaaagggaaattatatatttaaaaacatcaaaactttaactaaattgccatgtggttgaatctgagcatctatatatgttcatcattcttcaatattcatgagaacagtttaaccaacctcatcttcaatcatcactattagttctcattaatatatgccacaaatgctccaaccaaatacttactacaagaccacgatttctttcctatggtctgatttgcttgttcaaatgagacactcagtcactcacactcacgcggttacattttaacacatagcaggtgcggtcaagtgcgattttataatttttttttcccattgcgtgtttgttttttccttttgtcttttttctttgttaattattacttttgttgtttcattgatctaatgaatcttacaattaaaggaaaaagactcaaagcaattaaactggaacctaaatctcgttcacaccagtaacttcaatccttgcctcacaatcagctaaatatatcatgtacgttcaatgtatggtttgatcagaatctctcttaatattttagccggctggtgcaaaacaagaaacaagaaaaaaaagaccctttatatataagtatttaaagttttaaacacatattttttttttattaaaaatagtaagttctattacattgtttgaataatataaaagaaagtgtattttatggccgggacgagaaaattaggctataaattttaactatatattttttaacaccacgaatttatctaaattgacctacaatacttgatacatgattttctcaataaataaattcatccgaatgagaccccaaatgtccaaactactattgaacatttataaaataagatccataaaaaaaatataaaaggagagaatgcaatcatcatccaagtatggcctaattaaaaattatcttatgttattactttttactagatttgcttatatatatataaatagctagattttgtttaagtaatagtttttcttctatctattaaataaaataaaatagttgaagtcttatttccattatatcaagttgacactaatttaactatattagtttcatgttatctattcagtcatttagtatcacagtcagtaccactcttcatctattatttttctttgatttaaggtgagaaaattattcttgatatcaaaatcatagaaaatagtgaaggatcttttaatattttgataaaaattgaatgctcaaattgttggaaagttgaaatttgaaatcaacatatatgaaattaagtttaagaagttgaagagtttagtcagaaactacatttgtcctcaaagcaacgaaagcaaaatagcactacccaatagcagcacaagaagcaactagctataaaggtaggactacggactacccatcacaagctatgcatactacccagaatgcagttcccgcccactaatatggcatactaattactagggttttttatctcataaatataaaatataaaatataaaatattcaaataatataacccatagattatttatcaaaatgatataaatcactgtttctgaagagaaatcaattattctcaaaccgatttctcataatttttattttatattgggaaatcaatttcccataaatcgatttctcaatagaccaattttttttaattgtatatttatttattttggtttttgaaatatttaatttttactttttaagaatgtttttgtttattcttttaatttttaatttaatgatttatatatttaacaaaaatattagttataggaattagttaattccttttaaattttcatggagatgactttttaggctattttatttatgtttatgatgttctatcgaacaaacaaatgttagtgtagtctcataaatataaattgtgggttaaatacaaattttatcaataaaaaattaattttaattttttataaaaagattaaaacattttaaaaaaatggaaatgaaaagtaaatggaaatccaatctagaaaaatatatttcaatcattctatagttttacttttttttttcattttattttcatttccaaaaaaaatgtggatgtagtgttattttgcatgattgaagaagtcagaagaaaaaaaaaagtttagataaatatcataatcatcaaagactaacatgattaaagtaaataatcttaaaaaaagtaacaacagaattccattgaagaatttcaagtttgttttaaaaaagtaacaacaactagtttgcacaatgactacatggattcatcacgcatcagagcaatgatttcaatagttgttcttggttttcttgatttgcgcaatagggcaaggatttcatctggagatcatctaaaacttgcattcaactcaataagacctttgacactaaatttttaaaagatgaaaaacattttcccacaccatcttcgtgtttaagctccatacattcgtattcaacatagctatcacctacgttaattggttgatggtaaaaagattaaataaaattttgcaacctctgatggcgtctataattgttttccttaaggcatcaagcgacatatcctcagttattgttatgattttagcaccactagtgttgatttgagggggagctgtatgaagattacttgaagaatcaagcaacatgaagacttggatgttttggctttcaacatggttcaagagttgaagaatccaagtgtgtgattaaatgtaaaaaggattgaaagcatcttgatgatccaagctttgcatacatatcattcatatattttaagcattgcatcatatagaatctaagtaattgatatagaacttaaaaagaagctatgtcttttagagattcgataaccgtaaagacagatcgacaccacaagtgggctcaaaagagagctgctccccgattcgattatttacttaaaagaatcgattattttgttcataaggtcttctggaaaatcatcatgaacactttaatcgattacatcatcggattaatcgattacatgaatcttagcatacttagaaattggctatgtgactagtttaatcgattaccatatatccgtaatcgattacaacctattctgaaaatgcagtcactctggcttaatcgattaccactctttgtaatcgattatttagttcaattcatgttttgcatacacactagcttaatcgattaccatggattgtaatcgattaatttatactgtcttgatttatgctcgctctggcttaatcgattaccatggaatgtaatcgattattttacttaaacaggattttgctcaagtctgatttaatcgattacgcatcgggttaatcgattattttatccgttatctgaaatcctgaactttctcaggtcgttttaatcgattacaggagcgtgaggagcgtttttaatcgattaattcagttacgaaaattactatatattgaacctttgcctcttgtgatcaataaccgaaaggagattgaatagaacttaaacttttcaaattctgagcattgttagagcattctaaggattcacaaaggcaattttatgggttcattgagtcttgcttccattaattcattcatgggtcactaaggtgttagtgaagcaagctattctgtcacaaaggataaggaaagttgttctgcacatttggtttgcattcaacctgaggtttttcattcatatgcatttcattcttggttcatcaagtgaattctttccttactctttgtgggtgtaaaagtttttctgttgaaatctttgtatttgtggttctattgtaagtgatttttttctttcaaggggagatagtgtgtaacaccccgtaggcctccgacatgttatcattaataatatcagtttaacgcttaaaatatgattttgaaaaacctcagcggaagcacagaatcgttttcttgattcattatgtatgaaatactcatatatcataaaatgcacacatacaaagcatatatttcacacccctgctgatccagttctcatatcatacatcatgaagacagacaactaaaagacttaggcagattatcaaatatacacaaaaatactcaggggaaagtctcatgtcataacctcaaatagttctgtacataaacatatacatcagtggtttcaccataaactggtgatacaaaagaatatcatcccttctcgagggtctacagaactatacaacccttctcatgggtacaaaatataatcaaaacaaacctgagccttcaagctccatttgctgcttctcagtcaagcagaagcgtctctactcgggcctcctgccctgagactgctctcttcgtccagaagagtcacctgaaatcataaatccccacacggggtgagatacacatctcagtaagttcagggtccatgggaaatccttcccaccctggcccactatccacaatgcacacacaaggcaatcacacaccaaatggcccattggccctcatagcaacatatccatcatacaaacatggcggatctcatcaacgcctggcggatctcatcaacgcctaaatcacatggcagagaaccctcaatgcctagcggagaaccctcaacgcttaagtcacagggcagagaaccctcaatgcccagaacatatggcggagaaccctcaacgcccaaataatagcataatcaatctcaagtacatgcataatcaatttaagtaatgcaacaaccaaatgcatgcatcatgaatcatgaccatcactccccaggagtgtggtgtgcaaccatgcgggaattcattcccagggacactgaacttacctggtaaggtttcagtctgcagttcctgtggctcccgccaccaacagtctcaatctcacgccctaatcaagacatattctaatatcaaaaccaatctacagatatttaaacacagaacatatcatatacagaattcccctatcttagggttcaatcaaactcagcccacaccaggctgtacacagaccatacaaggtctatcaagctgaataacaagcatctgagtcatctcagactcaacgcaaacataagcatggcatagtccctcatcagcctcattatacataatatcactggaatggtccaagcctcactcaaggcaccattccattagccacacaggcttataacaggcataatcaaggctctggaatggcctcaattccacaaatgatttatcacaaaggcctcacatacaagtcacagagccaaatttcaaagttatctaaatcagaaactgaaagctaatccttcatctattcatcgctctctacaactttctctacaggaccctgggctaattctagccccagcttatatgggtcactattcatggaaacccccagagtcaaaatcaaacggagaaacttgagtctcttacctcaatgacgactcagaagacctcaggacagccttcttgagctttagtgtccttctcaagctgtgggtcctcgccaagactcaagttctctgagtttctcctctgagattccacctctcactcaaaaggggtttttcaagagcagaaatgaaggattaagctttcccaaaggttcctctcacactcaaaggtcttagagaggtgtttaggccaagaaaaggggtctaaggaagcttggagcatgcatcaatggaggttggggttgtggggaaggagaaaccatgatttttgggccaaaatttcataaaatggccttcaaatactggttctgccgacgttcccgcgctatccgcaccaactaggcgcgtctgtggcgctaatcgcgccaaactggcgctatccgcgccatcaggccgcaagaaatggccttctggtgcaatttcacgctactggcgccacatcccacgctactggggccgcatcccacgctaaccacgccgttcccacgctatcagcgccatgctacagtacaactacagtaaaatattattattttatttatttaattaattttttttagaaaccaggttattatatagtgtttctccaagtggagatagggtttctccaaggacagctgagtagtgttctcagtgtgggtgtggcttctaaggatctaatagggttttagatctctgaacttcatctaaggttgatgaagagaagcttgtaaattcttgtaagaaaaatatttgcaatagtggaactctactctagtgttgagtagaagaaactggatgtagcctcataggttttgaggtgaactagtataaatcttgtgtttagatttaaattatgtagatttgattatcctttgtgtgaattctgttttgtatgtttattcttgaggcattacaagtcttggattaatcttggataaggattcttgtttgattttgtgataaagatccaaagggcaataaaactctaattttcctcaaagaaacttttaatttaccaagactaactaattcacccccccccctcttggttaagtgtgaagtgttccttatttttcacaattggcatcaagagctaggtcttgtaagatactcaagatcactgtattttttcaaaaatgaacacctcacaaataacctttaaggaaggagcatccttaaaaagacctcctttgtttgaggcggagcatttaagcttttggaaaaatagaatgaagatctttatccaatccaatgatccaggagcttggaatgttattgagaaaggccctaaagtgcctattaagatggtagataacaacatgattcccaaagattgggatgggatgaatgatgatgaaaagaaaatttttcaatatgattttaaggcaaagaacatgataatttctgctctatcttctgatgaatttttcagaaccgttcgttgtacaagtgccaaggagatgtgggagatgttggaaatcacccatgaagcaattgaggaagtaagaaggtcaagaaagcattctttgattcatgaatatgaaatgttcaaaatgaatcaaaatgagagtatttcccagcttcaaacaaggttcacacatatagtgaatcacctcttgggacttagcaaaacatttgatgctgaagaacttaacatcaagattctgaaatgcctcactaaagtttggcaacccaaagtcacagccatcaaggaatcaaaggacctctccaaaatgacaatggctacactttttggtaagttgcttgaatatgagtttgaattatctcaactaacttttggtgaagatgcagagaagaaaagcaagggattagcactaaaatctgcagcacccaaagtggagaaagaagaaaactctagtgatgaggaggaagatgaaagcatgaacttaattgtaaagaacttcagcaaattcatgaagaagaacaagggaagaaaattttcaagaaacaataagaacaattcagcaaacaacagcactagcaatttcaagaaattggacaacagctatacttgcttcgaatgtggcaaacctggtcacattaaatcagaatgttccatttatttgaagaaacaacagcaagacagcaaagggaagaagcaagctaagcctagaagagcatatattgcatgggaagataatgaatcttccacttctgaatcctctgctgatatggaagaagaaaacatgtgtctaacctcaatcatccatgaagaagatgatgatgtgctggatgaagatgatgaggtaacttccgaacttgaacaagatgttttagcatttcaagagatgcacaaagaagcaaaaaggttggctaagtctaacaacaagcttaaaaagaacatggaagatcatcttgccaaaataatggagctacaaactgaaatttgtaacctgaagaaagagaataaaaatctgacttctaattacaaatcaagtggatgtatgtgcacctcttcctctacatctagtgacaagtatgaaatgttgcaaaaagtgtttgatgaatatagaatcaatcaagaggaaaagtatatgcagcaagtctcaaagaacaaagaattgattgacctcttggaaaagctcaacaagggaaaatgtgatttagatgaaatgttgagtgcccaaaaacagtatggagactgttaaggattttaccacggcaagcgtaccgttgtatcactgtaagtttcaaatttataaaagttcgtatccgcagggatttgagtttacgtcggttgaattaaattcgttaacagtttagtagttatatacagatgacgacaaacgaaagttcatctgttgtttttgcgtaaaataaagataaggagaaacaaagaacgattgcggaaagtaaataaacagatacagatcaagtgagagtaggattggatttcctcttgcttatccctttttaattgattttacctatgcatgtcttattcttgttgccgcacacgtctaagtaaccctaattcaattcctcgcaattacggtcctaaggattttttactaaatatcgatccctcgcatatttaattaaatacccaagcattaagattatattcacgtgtttaatgcgatcaaaacattaagatctattcctagtaacgtaatgtaacgagtgattaaattcagttcaaaccctaaatttactttccagtcgcctttagggttaagttcatgaaactaacagttaattagaatcaagcgttaagcgtagaataaaatcaccaacaaggaatagaacaatgcataaataattaaaatagcatagggataagaagagtacgtccaatccttagagaagcttaagtgaacatgagcagaacctcctcgagagaatcaccgactaagctcatcatcgaccctctctttggcagaatctccttacacaattcactctacctcactttcctaagttctacactcactcaaaaagctaagaaacaaaggatttgaacaagcaactcaatttgggagagaaaccaagtgaaaaagcatgccttcctccaagaattcgtcccctatttatagaatttgagctcctgcctgcttggggcgcccaggcgaccaaaatagcctataatcaggcgcctgggcgagcttaggcggttcctgggaagatgtgactcgcccaggtgaccaaaatacacatgaaatggtggcctgggcgagctaaagcttaactattaaggaatccttgggcttttgctttctgatgggcctgatttgctttttgatgcttcttcttttacttgattcactccatgcttcttctttcgcaatcttgcttcttccgtaacttcaaaacctagcaaaattgaatcaattaactggacgaaagcttctcgaaatacaaaagcatagcttaccttaatattatgatcatttaactaggtttctagggttatcttatgattaaatctataaaaatgacggctaagtgccatgtttgaatcctattttctactaaatgtggcacttatcaactcccccaacctggaatcttgcttgtcctcaagcaaaggtaagaatatcatgttttaacaagaatcaacttaattttttctcagaacaaacatttcaaaaagtagttcaccttgatactttgagaaaacaatttgatggattttcttgaaattaaaatgaggttagagtcaagttacacttcatttcaaaaagacctcagaggaaatgtttgactgattttaaacagaggaaaacctctcaataagtgtttaatttctcccaaaggtaagtgtttactctcacatccatcactgatatatcttaggtaaaatttgcagttcatttcccatcaaatcataatacatactcatcatggatcattaggtcttttatggctggacttggctagaaagaaatcttgatttttctggatattcaaaagaccttaggcctaggagagcaaactagaaatatagacaacgtttagactttttacttcctattccttctcttttttccaagacatctttttatcattttcacccaacttttctttttcaaggaattctgatttttcatttttctttatttctttttcatttttctctttttcttttctttttctttttcacataaacaacatataaccactactaaaattcttttcataactatccacaagaaattttccatcacaaatcattcctttttttgctctcctaacctttaggtggggtatggaattcctatcctaggttagggtttcaagaaaatattactgtttagaattaggctcaaaagggtttgcaaaggataattcatttaatatattgggatggctttttggctagtggcttataatgtgttcaaaaagaaagatggcctaaatcatatccatgaatcatatgtttatgataattagaaattcatgcaaaaattactatagattatatcagtgagatttctctgtgtataattgaaaaacaaatgaacacttcaaacaaccaagaggggggtgaattgattgtttgcttgaccaattaaaattttatatcagagttacaaaaggatctttatcactattaaaactattttcaaaaacagaaataagttttcaatcaacttccatttccaagaacacttgaaaccagtgtacctcaaactgagcaatgaatatgattcacaaacaaagcaataagaaaataatctgaaagaataaagagaacacacagattttatactggttcaccttaaacactatgaggctacatccagttcttccactcaacactagagaggagttctactattgcaaaatgttcttacaagcaattatacaagtctctctttatcaaccctagacaaagttcagaaatctaaaacactattagattcttagagacaaacccttcacactgagaaccctactcaggtgaatcctagagaaactctatctccaagcttgaaagaaaactcattacaatagagttacatatcaacagaattacaaagaatttgatttacccaatcaaaagacaagaaaagatatcacctgataatccaagatgaacgaacatgaatgaattacagatgaatatgcagattatcaactcatatatgcagcttttcttgaaccttgattgaaagatgaaacttcagctcatgatcaatatacccacatgattctttgaagtttctaagtgtttctaatacagagaattagcaccaatgaatgcattaagtgtttgtgaatgtctacaacacgaaattctcaattgctcactaatttttcgaaagatctcaattctctcttaatctcagtcacagagattatatttatatatgtcagttaactgaaaataatcgattaaatcagctcttgtaatcgattatttcgacaatataattgattaaatcaagatagtaatcgattaaaatgcttaatgctagttcaaaattccaagaatgaatactttaatcgattattccgatacgtaatcgattaagccagagactcatgcttttgctgttcgaacaaaataatcgattataatttcatgtaattgattaagtctgagagtcatgtttctcagacacacctagtaatcgattactatactttgtaatcgattaaaccagtcaacactactttctcatatttgtctaggtaatcgattaaaccgttgtgtaatcgattacaatgctcattacttgtttcctgaaggctctaaaaacaaaataatcgatgtcactaagttggtaatcgattatttcagtgaaatatgattttccaaaaacttaagcctttcttagttgattaccatgattaagcctattattctaataatcctacatgaatgaatgatgaatgatatgcatacttggattatcagatcatacattttatttttacataatcaatttgaatcttcaatcttaaagattcatttcctttgagcattgttaagcttcctttgaatctttctcactttgcatgttgaaagcacaaaactctcattcttgatcttcaatgatgcttggcttcatctgaatcaacaataatgtctgtttagatgcacacactcacttgggtttaaggtttgttttcatgttctcaaccaaatcatttgtttcccactgaagttttttttatcaattttcatgcaaaaagactttataccttgattttgattcttccggaaagaccatttattcttgtttttcatttctccagctttcctacaaaaacttcatttttgtggttctgatttttttaaaagaagttttcaaagcattttcagttgattcttttcaaaataccatatatcaagaaaaattttctatttttatctcacaaaaaattttgtcctaaactactattttatttacaaatttatgttatatgcaaaaagtgtaactttatcaaaaagtgtttttctagtgcacattcccaaaaatattgtctaactgtgcaccatccaaaataacctatatgcaaaaaattaacacaattacggcaatccacataaccaagagcatataatactaaaaagtacccataaaaatgcaagtgcataaaccaaggtatgcaagtatatataaaaacataaagaaagcggtaaataaattaaaaagagtgtcacaaatttttggagatccgtcagataagatctgtcaaatatgctgccaagtcttgctctacatcatccgccgcctctccaccttctgttgcaggttcttcagctgcaggatcctgttgggctgcggagccccccacctcctcttgaaaaataggcctgtccccaggccatgccacatgtgctttgaactgatccggagtaggccatgggaatgggttcggatcctgttggtgctgatgcagtgtgtagttgtagaacctttcgtttagctgcatctggcctcttaagttggcagcttgctggtccgctatatgttgcatgtaggtatgtatctgaagctccattctctgcatgtgggcagagatagatccaaagaagctggctttggctgctgctcaacctgtctagctaaacaatatttctcaatgaaagcacgactaataggagggcggatatttctagaggggtggacttggattccatagaactgacataacccagtaataagagcggggaatccaagagccctatttgctcgctcggggtttagaggatgcctagttggttctaagataacaaattgatgaatggcatcggaaataatctaagccacatctatgctaagctaggtcaatatactaaaaaccagttgacacttactcatgggtaggtcggagttatgatcactgggtaagatgttgcttagcacaaaggtcatccatatctgggtaatagtggtcatattatttctcattacccttaccctattacctgtgataccgcgagcaaaatcagtacctggaatgcaaagaagttgttgcatagcttcttcattaaaatcatttctcatctccatgtactcgcagaggtgtccttcagggaggacaagtggattccttagaaattgattgatggcatttgagtcatatgggatccattgtcctcttacatacgacctcttgtcacacagggctccctctagtggccatgcgttggcatagaactccaaaacaatctcgggatcaaacttttgtaagggaatggctagtggtctccactttcttctatcgagttcgtctgcaaattcagtatattcctcattgaatagttgaactcgtctctctttgagaaaggaccagttttgtatggctttgaagcggagttggtgttctttgcttctaaacctttgttcatcatatataaagtcctcttgtggggttgcactagtcccttcatttctagctcttttatgttggagtttctttggggccatctgaaatatttactcaaaaacaatttcagcatttttaataagcaagatgcaaggtaaatacaagacaaatggcaactatggtcatattaagtcacaaaattcctcaaaattcctccatttctaatgttcaagttaaaacaagggattcaatcttcatgctttcttttatgtttatgcacaatttacttcatgtttaagacacaaaactaaatgctgaaatttccacaaatcatagccttggcaatttagtatctcactatgtcaaaataaaaggctatgtctttcacacataagaatgcacatattgatggtttcattaattattgtggcctaagttatgacccatgggtatttaaatgtgtttaggactagttttgtgaaccattcatatgcatgacaaaaactgatttcattgtggcaaaataacaaacacctagtgtgcataacatttggaaccttgaaatggttagttgggtacatgccttatgccaaaattttcaaagaaatgagaagaagaagtgaccaattacacgtatgtacaacaaaaacattcaaaatatggtagaatcattaattatatttttgtaaccataaaagagaatcaacaagcacagttttggtaatcatcatgcaagcatagtacaaaataggaaaagtataactaaagcttggatgaagtaagtacttacttggtggtcaaaagtgaaatgaaagcaaagaaatggaagaatgcacgacctaagtgagtttgatggagaagggaaatggaaatggacagccaaggtgaatggtgaaaagatgaaagcaaaaattactaaagttaaagctttgtacctggctgtttgtgatctgcacgagtgagctcgcccaggcgcccaatttagcctaggtgcactcgcctaggtgagctaatgtccttttttttttttagaaatataaatatactatctatatttactaacctatatttactatcctattgtagacatatatatacataaatatttatattaaaaatataagaaaagatttaaaacatacctgactaggttgcctcctagaagcgcttcttttacgtcgtattagctggacgcatagcagctcaattgtcttgaaggtgtatcacagtgatgatccttttgaattcaccacctaggtatggcttgagtctgcttccatttacagtccacgttctttttgtactggggtcctcgagtatcacagctccatatggcttgacttcctttataatgaaaggtccggaccatttagacttcagctttcctggaaataatcttagttgggaattaaataacaaaacattttgtccaggatgaaaatttcttttcacaagcttcttatcatgatagaatttaactttttctttataaaacttggaattctcataagctgaaagcctcatttcttccagttgatgtaattgtagcttcctttgttcacctgcaaggttagtatcaaaattaaagaattttaaggcccagaaagctttatgttccaactctaccgataaatggcaggatttgccataaactaactgaaaaggagtgagcccaatgggagctttgaaagctgttcgatatgcccataaagcttcatcaagtttttgagaccaatccttgcgtgactgggcaattgtcttctctaaaattcttttaatttctctgttggaaacctcagcttgcccattagtctgtggatgatatggagaagctaccttgtgacgaacaccatagtgctgaaggactttgtgaagttgagcattacagaagtggtatcctccgtcactgattagtacacgtggtgttccaaacctaacaaaaatatttctcttcaagaagcggataactgtttttgaatcggctttttgcacagctactgcttcaacccatttggtcacataatccactgctaataagatatattcattggaataagaagatggaaatggacccatgaaatcaattcccaagcagtcaaaagctttaacttctaagatattttgtaagggcatttcatttctttttgatattcctccgatcctttggcaactatcacatctctgtacatattcatgggcatctttaaacaatgtcggccaatagaaacctaattgcagaatctttgcagcagttctttctccattataatgccctccaaacggtgaattgtgacagtgccacagaatgttccttgcctcttcttgagtcacacatcttctcaaaaggttgtctgcacctattttgaagaggtatggatcatcccatacaaagtacttagcatcactgagaaacttcctcctttgatgccaagaataatcttctgggattgcaccaactgctttgaaattagccatctctgcaaaccatggcctttctgaaatgtgtaggagtttctcatcggggaattcttctcgaatttctggatctggggtggcttcattggtgagtctaaacagatgatcagccacataattttcacaccctttcttatccttgatctctaaatcaaattcctgcaatagtagaatccatcggataagacaaggtttggaatcagttttaaccaacaaatacttgattgcggcatgatctgtgtaaattaacacctttgatccaattaaataagatctaaatttttctaaagcatacactataacaagtaattctttttctgtacttgcatagtgtatgacatgaaaaactttatttttcctttgactcaaaactgctcccaccgtgtaatcacttgcatcacacataatttcaaaatcaagattccaatctggtgcagtgattactggtgcggaaactagtttttgtttcaaagtttcaaaagcatgtaaacataatttatcaaaatgaaatgggacatctttattcaaaagattgctaagtggtttagcaatttttgaaaagtcttgaataaaccgtcggtagaatcctgcatgtcctagaaagcttcgaacgactttgacattgcttggtggaggtaatttttcaatgacgtccactttagccttgtctacctcaataccctgcatagaaatcttgtgacctaatacaataccttcagtcaccataaagtgacacttttcccaattaagcacaaggttagtttcaatacaacatttcaaaacagtatcaaggttagacaaacatgtatcaaaagaagtaccaaaaactgagaaatcatccataaatatttcaatgctcttttcaactaaatcagaaaagatagaaaacatgcatcgttgaaaagtagcgggtgcgttgcataaaccaaatggcatctttctatatgcaaaaataccaaaggggcaagtaaatgcatttttctcttggtcttgtggatcaacacagatttgattatatccagaataaccattgagaaaacaatagaatttcttacctgctagcctctttagcatttgatccatgaagggtaaaggaaaatgatccttccgggtgcgctgttgagtttcctatagtcaatgcacatccgccatccagtgacagtacatgtaggaatcaactcatctttatcattcttgattactgtcattccacccttctttggcaccacttgaacagggcttacccattggctatctgatattgggtatatcatgcctgcttctaacagctttactacttcttttcttactacctccttcatggttggattcagacgtctttgtggttgtgcaacaagtttaaaatctttttccattaaaattttatgcatgcaatatgaaggacttatacctgttaagtctgacaaggtccaaccaatcgccttactattttgttgcaagacttctaccaacttcttttcttcttcctcagaaagatttgcattgataatgactggtttctgatcctgaaagaaaaatatattttaaatgtgaaggaagtaccttaagttccagctttggttcttcttccttcttttcttccttcaattcttaaaaaatgttgtgatgaataggaacttccttgtaggtgtttaactgatgaagatattcagaggtgttgctatgtccatcttcttcttcttgagtttcagttaatgctttttctaacccatatttcttgtggaagaatcttctagagtcggaaataacttcatcaagaacatcaactctaaagcattctctcttatctactgggtgcttgatggcttcaagaacattaaactgaacttcatcatcatgaactttgacagtgagctttgtaatatcttggttttaaacatgtaattaagccttggttaagcttatgattaagtataatgattatgattttagatccctaagagaatgagcttgagaaagcaagttataggcagttctgccctgcggcgctagtagcgtgagaacggcgctagtagcgtgggctggccgagagtgcggcgctagtagcgtggagttggcgcgagtagcgtggcttggccgagttcatgcctcgaccagcgtgggaacggcgcgaccagcgcgggaccgacggatcagttttataaatagcccattttggggctgaagagagaggaaaaagaaaaggaaggaagagagagaaacctccattgatgagctacagagctttatatcttctttatcgtgcacctaaacacctctgacccaactgagaaattgatcagagccccgagaggagagaaacacctcgattgattctcgaggaagagcgagaaatagtgagattgatttctctgagagaacccttgagagctcggagtttagagtcgaaagaggccgtgattgagcaagttaccttagggaaagcgattccctggtgttttcgagcatcacagaggtaagaaactcgagctctaaccgttggttctgtgtattggattctgtgattttgggggttatcttaaggggtgtttttggaggtgttagagccgttattaggctcggactctgtagagtcttatgctcaggggactgttctgatgaagttagagccttgaaccatcattactgatgaagtttgattttggctatgagtctgcatgagcagagataaaaggtcaactatttgactagtctggaccttagagcagttgacaaagttgctcatgagatgatatagatgagatagaccgattgaaactggtgattatgagaaggttggtttcaggctattgtaagcagagatatgcttgataatagctggatcagagtccttgtggagactctgtagccttgtataggctgagagagatcctagtgagggtctgaggatcacttgtaaagtgattgagttatgtttatggaaaggatgagagtttcctttcgtttgaacggtctagaaccgtatctgatatgttatgtgcttgttcttgtgtaggacgtgagcttgagagctttggtggtgtagaccacgaggccgggagagccggtgatctgtctagagcaggtaagctcttagtccttatttgtgtatcctctgctgtgttccaccatatatccagtagggttatggttctgatgtgtgtgtatgttagcagaggaatgatgtataatgctatgattgactgatgagtgtgatttgaaccctgtgaaagggtatttgaggtctgacatgtggtctgggtaactaatgcttaatattaatctgaacccagagatggataattattgtgtatggccgtgagctgttaattgatgatttggtcccctgagaaagggaattgatgtgtatggctagagttgattggtagcatgcttgattagatataaaactcgagaatgcatgctgtgattgattgatatcctattgtagtaggatagatgacttgagattgaggaagacctggtgagagatgagcctgtgatatggaggtagcctcctatgtggagatgatcccatatacacagatgtagccttcccaggcaattgtattgtgttagaggatgagatggccctgtgctacatagaggagcctcttgagaagagatgttcctatgttcacagaggtagcctcaccaaaaggagatgtacctaatatatagatgagcctcttgagatagagatgtacctatatattcagaggaagccttcgctagggatacatgcaggagatgtgcctagtatatagaggtagcctccctgtgaggagatgttcctatatacttagatgtagcctctgcatgatagttattgatgtgatgaatggctttatgccatgagtgtgccttggttttggctgatggatgtgtatagcctgattgtggtcaggtgtattatgcatgatgattgattgagtgattcactgatgatgattgtgattgtggttgatatatatatatatatatatatgttgtcagtgaaccaggggaaggaaataccttcaagggccctgagtttactgagattttatatctcaccccttgtgtggggctatgttttgcaggtgattcttccagagtagcagagagatcccaaggcaagaagcctatgcaggattagctgctgatggacaccttaggctagagaacatgagcttgtgctctgatgctttgtatttagcctttggttttgtattttgatgtaccctgatgtgattctgtatagttttgtactgtacagagaaacttatatgtatattcaccatattatagtgtacagtgttatacagatgacatttgatgatgtcacttttagtatatgcttccaaactgcttaaactctgattgattatctgtttaattgtggtgtatgtttggtaatgaccctgattagtgaattagggcgttacaagctttccctcatcaacatcaatcagcaccttggcagtcttcataaaaggtctaccaagaatcaatgggacttcactgtcttcatccatatccataactacaaagtcgaccggaaagaaaaatttgtcgactttcaccaacacatcttcaataacgccatatggatgcttgattgatctatcagctaactgcagcgtcatcctggtaggtttaataacaacctctcctatcctcttaaccatggataatggtatgaggttgatgcttgcacctaagtcaagaagagatttccccacagataatctaccaattgttataggaattgtaaagctacctggatctcgagatttctctgggagagtcttttggatgatagcactgcatcctgcatctagctctatggtctcctcatcggtgtatcttctcttcttagttaggagatccttcatgaacttggcgtatgttggcatttgctccaacgcctcagcaaaaggaatatttatttgtaactgcttgaatatatcaaggaaacgtttgtattccctttcctttgatttcttggatggagcatgtggatagggcatatgttggactggtggtggggttaaggctgccttgcctttttcactctttttctttttatcctcacttaccacttttctctcaattttctcattaggttcatcctcttctttttcttttcactttctttttctatctcatcattttttctacatttccttcatttttcttttctttctcatcatttctacccactacagtaccccttctagtaataattgctttacactgctccttgggattgacttgggtatttgctaagaaagatccacctccattgtcagctaattgctttgcaagctgtcctacttgaacttccaaattcttgatagaagcttcggtgttcttttgattgctgatggacatttgcatgaattgtgttagagtgtcttccatctttgtcaatctatcggactgagcttgctgtggagggtttctatttagaggacttgaaaaagaattagaagaactaggaaaggaattgttagaaggacttgcaaaaggagggttagtgggaacatagacattattattttgcctccaattgtaaggttggttagaacctggattattgcgatagccttggtaattcccttggtagttttgaggtcttggctgattttgcatgtaatgtgcctcttcttcttgtgggtaatcaccggatgttgtgcaatatccgttctgatggtctcccccacaaaaattacatctcagcatttgttgaacttgatgggctgaatgagaatgagatttctgtgatcttccttactgaagttgaggaatttggcctatttgtttggttaaggcctctaattgctgggtcaagagcttattttgagccaagatggcactttgagtgtcaagctccagtacccctttcctctgaatgggtgacctatcatggtgagactgatagtcacttgcagctatgagtcgatgatcacgattgcttcctcgggactttttgacatcatggttcctccagctgaagcatctagaatcatctaggtttgaggcctcaaaccactgtagaagatatgcaactgagcggcgtcatcaaaattgtggttcgggcatctcctcaatagtgatttaaatctttcccaagtctcacatagaggttcatctacaccttgagcgaaagtggcaatggcggattttgcactgatgaatctcgaaggaggaaagaatcgagcgatgaatttctcctccaagtcttcccacgtgcttagactcttgttgggttatgattgaagccaagtttttgctttacctgttaaagagaaaggaaaagctctaagatatacagctcctgcatcctcgtccgatgctcccatcgtactacacagctccatgaaagtagatagatgcgtatatggatcttcatggtctaatccggcgaaaggatgcgagccaatgaggctaagtagtgcaggcttcaattctacaactttgtggtgaaacggaggaatgactatgctattataatgtttgggcccttgttggtatgcatagtctccaagtgtcctccttggtggttgtctatcttcttctcccccttgattagccatattatcttttatctgtggtgaggaaggatcaatagacgaagttccctcaatgtgcttgtcagtctcttgtttctttttctttcggagtttcctttaagttttggagatttccggatcaaaatgagttttatctgcagacttatctcgcataaagagaaagaaaagaaactacaagatttttgttaagcatagaggtttctaaaaataacaaagaaatatatacacaaacagaaaataaaagaacaagaaaatactaaactgaaaaatttaaaacaacttaagtaaacaagccaaatccccggcaacggcaccagaaacttgttaaggattttaccacggcaagcgtaccgttgtatcactgtaagtttcaaatttataaaagttcatatccgcagggatttgagtttacgttggttgaattaaattcgttaacagtttagtagttatatacagatgacgacaagcgaaagttcatttgttgtttttgcgtaaaataaagataaggagaaacaaagaacgattgcggaaagtaaataaacagatacagatcaagtgagagtaggattggatttcctcttgcttatccctttttaattgattttacctatgcatgtcttattcttgttgccacacacgtctaagtaaccctaattcaattcttcgcaattacggtcctaaggatattttactaaatatcgatcactcgcatatttaattaaatacccaagcattaagattatattcacgtgtttaatgcgatcgaaacattaagatctattcctagtaacgtaatgtaacgagtgattaaattcagttcaaaccctaaatttactttccaatcgcctttagggttaagttcatgaaactaacagttaattagaatcaagcgttaagcgtagaataaaatcaccaacaaggaatagaacaatgcataaataattaaaagagcgtagggataagaagagtacgtccaatccttagagaagcttaagtgaacatgagcagaacctcctcgagagaatcaccgactaagctcgtcatcgaccctctctttggcagaatctccttacgcaattcactctacctcactttcctaagttctacactcactcaaaaagctaagaaacaaaggatttgaacaagcaactcaatttgggagagaaaccaagtgaaaaagcttgccttcctccaagaattcgtcccctatttataggatttgagctcctgcctgcttggggcgcccaggcgaccaaaatagcctataatcaggtgcttgggcgagcttaggcggttcctgggaagatgtgactcgcccaggtgaccaaaatacacatgaaatggtggcctgggcgagctaaagcttaactattaaggaatccttgggcttttgctttctaatgggcctgatttgctttttgatgcttcttcttttacttgattcactccatcttgcttcttctgtaacttcaaaacctagcaaaattgaatcaattaactggacgaaagcttctcgaaatacaaaagcatagcttaccttaatattatgatcatttaactaggtttctagggttatcttgtgattaaatctataaaaatgactgataagtgccatgtttgaatcctattttctactaaaatgtggcacttatcagagacacgtctggtttgggttataaaaagagctttaaaaatgtgcaaaaaaccaagtttgttcttccaaaacaaaagcaaaagaaaaagccaagagtcaatcaaaggaggttctctagaaaaagatataatgctgtaacttgtcactattgtatggaaagaggtcatatagcttttcattgttttgcaagaaggtacaatgtcccaaatggagaatgcattcgggtggaaaagaaaaagaaaacaactaacccacttggacccataagaaaatgggtacctattcctttgaagtaatttgtttcttttgtacgtgtgtcttagagcaagctcttctctttggtatcttgatagtggatgctcaagacacatgacgggtgacatgtccttgcttaagaatcttacatttaaagaaatgggctttgtcacttatggagataacaataaaggaaagattatgggtgaagggagcattggtgacagcttaaacaccaaaatcagcaatgtgctttatgttgaagggctgaaacataacttgcttagtattagtcaactatgtgacaaaggctacaagatttccttcaatcaagattgctgtttgatttgtaatgataagagtgatgaggtaatctatataggcaagatgaaaggtaatgtgtatctactctctattgaccatgctttgtttcacaaaaccacatgcttattgagtaaaatagatgaaacatggttatggcataggagagcaagtcatataaatatgcatcatatgaataagcttattaagagggacttagttaatggcttaccaaaactcaagtttgagaaggacaaattatgtgatgcatgtcaaaaggggaaacaaactaaaatctcttttcaaagcaaaaacattgtttccacctctagaccacttgaacttttgcacatagatttgtttggtccttcaagaactatgagtttaggtggcaattactatggactagttattgttgatgatttctctagattcacttggactttgtttttgaaatccaagagtaaggctttccattcttttcgaaaattagccaaaattattcaaattgaaaaagggtgtaaaattgtttcaattagaagtgatcatggtggagaattccaaaatgaagattttgaaaaattctgtgaagaaaatgaaattaatcataattttccagctctaagaacacctcaacaaaatggtgttgtggagaggaaaaacagatcacttgaggaaggtgctaggacacttctaaatgaaacaaatttacccaaatatttttgggatgatgctgttcatacagtttgttatgccttaaatagacttctcataagacctattttgaagaaaaccccttatgagttgtataaaggaagaaagcccaatgtgtctcacttaagaacctttggctgtaagtgctttgtattcattacaaagcaaggcatatagagttttcaataaaagaaccatgtgcattgaggaatctgtccatgtaatttgtgatgaaactaacccctcaaaagaagaaaaagcttgtgatgatgatgcaggtaatatagagcagaatattcaattgaagaaaatgtctatcaatgagaaaaatgaaccaagtgctgaagaaggttcatcaacaccaagacaattgcctaaggagtggaaaactacaagagatctttcactagataacatcattggtgaagtatcaaagggagtctctactcgatcctcacttagaaatttatgttgtgacatggcttttgtttctcaaattgaaccaaaagatatcaatcatgctttgcaagatgaacattggatgcatgccatgcatgaagagctaaatcaatttaaaagaaatgaagtttgggaacttgtccctaaacctccatccattaagcctattggtaccaaatgagtttttagaaacaagctggatgaaagtggaattatagtcagaatcaaagctagattggttgcaaaaggttacaaccaagaggaaggtattaactatgaggaaacttatgctccagttgcaagattagaagctattaggctgctacttgcttatgcatgtatcatgggttttaaactctttcaaatggatgtgaaaaatgcatttttaaatggctacattgaggaggatatctatgttgaacaacctctaggattttctgatttccagcatccaaatcatgttttcaaacttaagaaagccctttatggtcttaaacaagcacctagatcatggtatgaaaggttgagtaagtttttacttgatcaatcttttgtaaggggcaatgttgacaaaaccttattcatcaaaagacaaaagaatgatattttactggttcaaatttatgttgatgatattatttttggttcaactaatccaaagctttgtaaagaattttctgcagctatgcaacaagagtttgagatgtctatgatgggagagctgacattcttcctaggattacaagtcaagcaattgaagaatggaaccttccttaattaatcaaagtattgccttgaagtaatcaagaaatttgaaatggataaaaacaaagatgctgcaacaccaatgactacttcaatttatcttgattcagatgagaaaggaaagaaagtagatgaatccaaatatagagggatgattggatcattactctacctaacagctagtagaccagacataattttaagtgtttgtctgtgtgcaagataccaagcaaacccaaatgagtctcacctttcagctgtaaaaaggatcatcaagtatctcaaggcaacacccaaagttgggctttggtatcctaaagatgcatctattaatattattggctattctgattcagattttgcaggatgcaaacttgatagaaagagcactagtggaatttgtcatctccttggaagctcacttatttcttggcattgcaagaaacaagcatgtgtagctttatccactgcagaagctgaatatatttcagctggtagttgctgtgcacaaagtatatggctcaagcaacaactacaagactatggagttgaattaaaggagatcccactgctgtgtgacaatacaagtgccatcaatatttcaaagaatcctgtgatgcattcaagaaccaagcatattgagattagacatcattttataagagatcatgtgcaaaaaggtaacataaaggtagaatttattgatacacatcatcaacttgctgatatatttacaaaacctctacctaaggatagattttacactcttagaaacatgctaggaattcttgatgaatataacatatgctagtctatttgtgatatgatcaatgtgcaattttgaatgcctacttgccattatcattactggattaatatgtaaagtttatcataatcaaaatgctctgattccatattaataagctgtatcgttgttagtaagctctgtacctatgattgaaagccatacaaaatgataaaatgctctgttttctgatactcgtactgtaataatcgattaagaatcgggataatcaattattttcattaaaactcaagttctgtttgaaaattaagctcatgtaatcgattacacaagagtcgtaatcgattacgcttcacaaatcataaaatgtgccactctggagtaatcgattacctatcgggttaatcgattacgtaattcaggtattaatttcaaaattctaaggggcgttgggataattgattaccatacgggttaatcgattaagatgttcatatccatgcttagcttgtcatccatggccaaataatcgattactttagcaatttaattgattacttatcatcctcaacctctggctatcaatactgtaatcgattacactgcggaataatcgattacactgtgtatactttgttatatttgctctggaataatcgattacataagaatataatcgattattaaagctgttatatgttctctaacggtttttgggagttcgtagctgcccaattaagaggatcctaagccataaatctccattaaattgcattaaaaacttctaacagctatattttcaaaatttatgaacgttttatgcttaatctgtgcctataaataacagttttagtgaatcaatctttcctagcaccaaaaatcactctctcctctgtatcttttctgtattcttcaacctttccctaggttcttgctctaaaaactacccttatgctctaatatcatcctttctactcaaataccattcctatctttgttctaaatcaatatgtcagcatcaaaaagggttagatctggaaaaaggaaagtaggagaatcatcctcaaaccttcaaactcaatctgtacttcagccacaacccattgataagcttgatatctggttctcttctaagacagataagatggactccatgctgaaactacaagaagacttcaagactgaaatccatggagccttagaagatattagggagaggctggatgctattaagactaatatgaatgatcaagtctctgcagtattctaggataaaatagatttagattttgtctgatctgttttctaggacaaattagatttagattttgtctgatttgcagaattctaggataaattagtgaagcattttgtctgatctattttctaggacaaattagatttagattttgtctgatttgcagaattctaggataaattagatttagattttgtctgatctgctttctaggataaattagtgaagcattttgtctgatctgctgtaatgcactatgttatgttttgttttaccttatgatcagtgctttatttccattatgtaactgccccatctgatattctaatgtatttctcagcctatattaatgaaatttatgctttctgttcatcatttatctgctgtgcattcaacttttgactttaaaaagccaaatagggggagaataattgaaaatcaaatgaatacgagagtgctctgcatcatactctgtttacccctgtttttcgtgccatttttaagctaaaatttcagctgcatgtattggaaaatttagggggagttaagaactgaaactgattgccatgaactatcatatgttagaaatgaatactgaatcaattacagatgcatttaacacttgttcttggaaaggattttaaattttcagatgttaagcaaagtgcagaaatgtatgaagcttttccattcaatcacaaatacccattacttttcaatttgaaatttggcatgtttaaagccaaaaagggggagagttttgatttgagggggagttgtatgaagattacttgaagaatcaagcaacatgaagacttggatgttttggcttttaacatgattcaagcgttgaagaatcaagtgtgtgattaaatgtaaaaaggattgaaagcatcttgatgatccaagctttgcatacatatcattcatatatattttaagcattgcatcatataagaatctaagtaattgatttagaacttaaaaaaaagctaagttttttggaaaaatagcctaagtctgctttaatcgattatttacttaaaagaatcgattattttgttcataaggtcttctggaaaatcatcatgaacactttaatcgattacatcatcggattaatcgattacatgtaaatatatataaccagtaccacactcaaataggaaaaataaataaataaatatatattgtagcttcccattccatgattgtagcttcctataaaataccaaataccagctccaattccaaatgcccctgcagctgaaacattgctaactgtccttgcagccaaaattcgaacacacaaccacaaacatgagcctaattttctacttcaaaaactatcattgagaaatttcttccattaattaacttcatttttatcatctgcaatcacatggacctttctgttgtgctgtgttgcagcataatctgccagacaaataatatccaatcaattttactttctcaacaattatatgtgactatacttgcttttttgtttttttttccttagcattaaatcctttttcagttatagagggatatattttctaaatttaatttaatatcattccatggttacttcacttccttctatttcaacttttctgtacaaataactcataaccataagtatgctctggaaactggagtaataaatgactaatcgccacatacataaagattttttgggacaccactcaagttctctacttcaataaacatgacttataaatgaattctgatccttctattagagggttatgtaatgagatagaaagaaattgtttattacttgtgcagaggtctgccagttctatgccaaagcgtttaatacttcaatatctttcattcccacaagagaaaagaactctctcatgttctccagacaaaaaagagaatccacatcccttatctgttataaactataaatttaccactcaaatgtaacttttggttaaaatatacacatatctacccaatttgcacacattacaaaattttgcttctgtatttttaagtgtgattcattcaagttggggaaatcttggtgggagcaaagagctaagtacataatcatataacgaaaagggatcgattccgattcagtatatgttatggactgtatacaagtgatataagaaaacaatatatatatatatatatatatattcaacttaaaatgaagacaattatagaattagatgaatagagaagtagtaccttcagagtgatgaatccacagagagcctcataattagtgattgcaagggccatctcaggtttgtgattgccatctttatacaaattagggtgcaacttatgcaaagtccttgccaactccttatccgggtgagcctgaattgacaaggccttccccacagacaacacctactaatgcatgcaaaaaaattcaatcttgtgccaaaatagagacacctatttacaaaaaaaaagggtgagagggggatccaaaaaacaccttgaacaagaaagggagatcagaaccccatttgtgaagaaccttgtgaccaagcacatcagggttctcgaaaatccaagccttgagggagacaacattctaatttccattggaggaggctaaaaagtaagggcctgaatcaggggtacccattcaaagctcgacgtaagggtcctccgcgtggaattcagacgcggaattgagcacgtggagtctggcaacctcggaaacgcgaccagggagaccccaatcgtagtttttgacaaagcaatggagcctctaaagattgacgtcctccatggctgtgatggtgacgatagtgagagagtctcagagaagagaatgggaattgagattgaggcatttgcgagtatttgaagcgtcaaagagagagaaaaagatggcacaagccgaggaaaaggaaggggtggggtgtgtctttttctgatgcaaacttccctttatttcttctttatcaagtgttgtgatgtcaaatgtgtgtgatcttatccttcttctttgttcttcgtcacatcttggagttgggtgcggcagtggtgttttagggcaacgaggcttgggagcgacagcggtgtagtgtttcagttccaccttttaatttctacacaataaaaccacgacagtttgagagagaaactgtccttgtccaacatagcatgctattttaaatacggttctcttataagatcgtcgttaacaatttcaaataattagaaaaataccactgttctttattctaagacgggttttgtatgatcgtcgttgatctgctatcgttaaataaggtgttcctagtagtgcaaagcgagcctttagctcagaatcttctacattgttattaatgtttttaacaaaaagtgttctaaaaggctgttcaacaaaacgaagtttccctttagaacctccaaagaaaccaaaatctccatcaagagcagtcattctttttcctgaaacatatatgttcatcttcttccatctccatgcctccactgctaaacatatcaaaatcttcaaaatcatcatttgttctggcatgagaactgcatcctaactcatcaacaacaccagaaaacatatcaactcaggcggcaccacggtgttccttgaggaggacccgaaggcgtacttgcgaggcaatgaaagtgcaagttggtgctggagaatcttcccgacgaggtttacgagacgaagtgggacatgataatgattgacgcgtcgaaggggtattttgtggtggcgccggggaggatggtggcggtgaagctcaacctcacgatgtacccttccacgcccctcacactctcccacccaatcgattaatggaagatgaagcatgcactcatcaacttcatatactcctcccactccctcacgctccctgaggatgacgacctccacctcaagcgcctcaaggaccttaagaaacgcgaccccatcatcgccggaatgctctacatatgggacctcttttccttccaaacagagaatcatcgattcctattaacggataagcttcacgggatcgaactcaacctcgagggcattaagttctgacctgaaattggaggagcgtaacacaaaatggaaggctctggaatttgtgcttcaactattatttaattaggtctaacaaacctcaacatcgattaaaagaaaaactgatgttgtctaagcactcgcaacatcggtttttaataaaaatcgatgttaaatttttttattttttacaaaatgatgttaagtgtgtatttacaacatcgattttttttaaaaaaaaacgatgttaaaatcgttctgttaacatcgcttattgacaaaaccgatgttaatgatgacattttatttacaaaaatgccaccgtgcttttgttaacatcgatttttataaaaccgatgttaaactgacgatgttaaaaacttttttttagtagtgatgccaacataaatatagaatatgtatgatgtatgatgcaatcataatatgtactaatttgtataagtaggagtagattgtgaacttaatactatatatataatcatgatgtctttttgaattttggtgataaaaaattaatttgattttttttatatttgagtctgttccaatttgttatgaagcatgaatcttgcaattcagtttaaagttcatggttcattggggttatatatggtgcagttgaatggttctagcaatagggtgacaagttcaccattctttggaacaagtttgaagaaagtcaattctgtgagttcaagccagaggggtgtgtgtgggaatttgaaggtttctgcacagattgaatatgatgaggagtgtaacgacctgcctcgtcgctacgatatcactactctaaacgggtaatttcaatttttaatgaaaactctattaatttgattatgaaaatgaaagtaaatttttcttgataatacatttatcaaacattgcacaaatacataagtaattacatatgtatgtatattttaaaccattatatatcattcacatgtcaaaacataatttagcttttaataaatatataagttggggtttacatgcttgattaaagagagtcaagggaccaactaagaaagagttgataacacaacactctctccccaaaataaatttcaatgttatcacgtcggcttggtggctccaacaaaaaggatctccctccaaagtcacctactgctgctcatctgctcccacgaatgaaggttcgcgatcatcacaagtaccaaccacagggtacaaaaattgcaagggtgagtttatcatacaaaatcaacaagttcctgataacaataattagaaagaaagcaacaataataaccacaatcattatcagtaatcattcagttcaacacacattgaacaaactagtcatccactttttccacaattcaaatcaattatgcccaaaatgattcatgcacctgactccactctcaccatgcaatgtggtaccattctcatggaaatagtctctcttaggaaaatgattcagtagtttatcggggtcaccctgttgcgcacttgccattccccccatggtgatcaaccaaagtctcaagggaattccaaattaaccgagtgacatgccccttagtacccgtgtttttatcccataaaaaccacaggtacacactgccttcattctatttccatcatgcaattatgaagtatgaaacatggcaccatcaatgcactgaccatggatagggaccagaattctaaacaatccccttctctctctagggatgcataaaattcataaacccttcctcgtaaggatatccaataagtcatgcacctctcatgtacatacacaacatacaaacatgggctcatcaatgcactccatggatagagaccggaattctaagcaatccctttctctcttcaggaatgcttaaaattcgtaaactcttccccgcatggatctccaacaagtcactgcacctcacatgtacaacatacatccatcacgatgacatcatcaaccttaacatcatctctcatctatgtcatcatcaacatcaatatcacctcaattttaatatcatcaacaacatcaatatcatttcatttcaatatcatcagcaacatcaacatcattttatttcaacatcatcatcataaccatcaatatcatctcatgttaatataatcatcaacataatctcatttcaatatcatcatcaacatcacaaacaatcccatttcacatctatataacatatgcctgagacttacattcccgaggtctttagacaacacaaacctcattcattcaaaatccacattaccacaagactgatattttaggaaaattctaaattaaagaggaggactacaatatagaaaacacactcttatgcccatttaaaaatttaataaagaattaaataggagaacatattataaaattttgggcaaagtctcctctgtatttaagacatttcccaaaaatccaatcattacaacaacaacatcattcatagttttatccatcaataacaaattcattgcatcccattagttaaaaacacagtttttcttgaaaacgagcacacaacagggacaaacatacatcaataataaatatatcgcatcccattaatttaagacataatttttcttgaaaactagcacacaacagggacagacatacatctccataattgagttccctgaccctcaattatggtatcaaaagctgtaaccaaacaataaactccccttacctatctataaattctctcgttagctcctcacggtgttgttttgatatccttcaagttcgcgtgctttggcacaaacgcagagctctatataccaagtcgaagacaatttagtatagatttcaaagacaaggttgatattaacattcggggtcaaatacccactcaaatttaaaatggcgataaaatggtattttgaaagtccacatgaaaaggacatcattttgaaattttgatataccaatgtgaccggggctcaacgaaggtcacaaaaacgacatcaatattataaaaaggaaacttttacaacatctcattttcaaaggtttttcaaaggaagtataaaaacacccaataacggtatcccactactacaaacaacgcttttgacgtcggttatttgacccattttacgttggttcgagaaccgtcgttgtagccaacgtcgttgaaaggtaagacattctacgacggttattgaatcatcttagaatgtgacattttaagacggttgttagcttagaagtcgtctttgaattttttttttttaattttacatcattctaagacgattataggctataactttcttagaatgtggcattaaaagacggttctttgttcataaccgtcttagaatgacacattgtaagacggttcttagtctataaccatcttagaagtctactttctaagacgattttccagacaaccatcttagaatgtcattttttaaataaaaaattaacttttctaagacgattttttagcaaaaatcgtcttagaagtctacattctaagacagttttcaagataaccgtcttagaatgtcttttttaaaataaaaaaataaaggaatctaagatggttttttcgcaaaaaccatcttagaatatcttttttaaaaaaaattaaaaattaaatgctagatgtttagtttgatttggtatgctcagtgtgcaattcatgattagattattgagagaagcaaacctacgagattactatacagttactcactttgcattataaaatatataaaaaaaatgcgaaacaacattagtcattgtgtcttaaaaagtgggaaataacaacaaaaagtactttgcatcataaagtccctaatctataggcattagacaaacaggttactcaaaagtacccattactcgaggtttgatatgactttttccagcacccaataactttgccagcccaaagtcagatattttagcattgatccaatcatcaattaaatgaatgcttcaagaaaacattctcaatacaaaacaagcctaagtaattcatatatagggctaaaacaagttacatgtatgcttcaaacaatgaggtaggtccacaggtgtaccttttggcattgaaagtgaaactcgccaactgcattgaaaaactagattttaccaactttatatatatgagccacaaagcaaaaagaactgaataaaagtatatctctgtatacctataaaaaataataactcaaatgcctgagatgcacattcactccctgccaaatcaaaaaaaaaattctaaagagaaaagaaacaaaaacaatagtaaaatgatctaaacattttatgttgagtgtgcaatccattgcctgaatattgataaaatcgaaatattttttcaggctgccagggagtataaatatcttcatatatagtttattaaaattaaactcttttctaatatttggtgttaattaattaccttttttgcctcttgctcatgaaactagatattctagagagacttgaaaagtcagagaagaatgagaaactttggatgtgatgtgtatatattaaaaatatatggaataataacttcattaattgccttgtctactgaaatttacaaagacaaaatagataacaaaaattaaaatatatggaatcctagactctagttcagggttcaaggccaccacatattcctaaatcctacataaaatatttcctaccttcattctatagaatattgatatattgatatatgtgtcttgagaaaaaccaaaaaccaaaacagatgttgcataattaaggacaaaatcatgacctctggtttttacccattgtgtgtgaacttttaaccattctttctaaatgttatccctttttgccatttcctgtattttacctcctaaaccatccatctccatattgggtacaactccaagttcggcatacataagaactcatttcccaaaaggccacaatttttttaaaaaagattcattgatcttggtttcgtttcactgcttgactaatggtgaaattaacattgttccctattgcggcagatgaccagaaatcagcataccctgcattagttacataatgttggatatagcgggagcatcgtgaagatttaaaaaaatttgattcaagattggttttgagatttcaacatgcttggatgccttgaagttgtttaattgtattatgtgtaagagaaagactaatttgatgatccatgcattgcattcactcattcattcataaacttaaatggttttcataaaaaataacaaagcttttatattttggttaagtttttaatctgattgaaaggtttttggaaaaatgctattttcactggtttaatagattaccttactgatataatcgattattttgttcatcgttcaatttggaaaatcttttatgaacattgtaatcaattatccatcgaaataatcgattatttgacctttgtttacaataaaactgccttgttaatgattttaatcgattatttaagtgttgtaatcgattacgtagttaatcatggactttaagttttgctgggataatcgattaccattatccataatcgattacataggatatttgagaaaagtcacttccatgtcttaatcgattaccacagcttgtaatctattacacagttcattttgaaaatataagtcttctgctttaatcgattaccaaatcttgtaatcgattacatagtgcattttgttatcctgagacttctgttttaatcgattacagttcgggataatcgattattttgctcgttgctgaaacccagaaacattcttgaacagtttaatcgattacatgggtattttaatcgattacataagaactttaatcgattatcaggcgcgtttaatcgattacagttagttacaaattctattataaataggattgaaggcttgacttgttttctaactttgagagattgtaccaattcgtatttctgagctcacataagtcttctaagcaattcctaagtggttgtctcaatgtttttacttcttgcttcattcaaaacatcaataggtctttgaatgattcttgagcaagattctttttaagattaaggaaaagcatgttctgatttagtttgcttctcaaccttaattggtgattcatgtgcatatcattcattggatcatcaagttgtctctctccttaatctttatgtgtaaatttggttctgaattcttgttgtatttgactattgtaaagtgggttctttttgcttggttctagagaagggttctctaactcaagaacagagtagtgttctctagttcttgctccttagatttctaatagggttttggatttctattctttttctagtgttgataaaggagaggtttttgtaaaagcgtgtaagtacataaatttataatagtggaactctaatctagtgttgattagaagaaactggatatagcttcagttgagaagtgaaccagtataaattgcttgtgtctttgattctatttctctatctctcatcttattcattggtctttgaatctttgattcatattcattgttcaacaagttctgttttgatctattgatttcttgggctgagacatttgattaagtaaaagatttcttgatacaatcctaaaaccaaggcaagtgaaggcacttccttgggtgattaaagaaccaatggcaagggatagagctcaaacactccaagatcatatacaatccagcctaaatctcttggagaaccatgaagaaggctacaaaatgatgaatttatctgttgtaattgataacaagtagcctataaccgatcaaatacacttgtataaatgtcagatttgtaaatagttctatgataatcgattacgagtcctatgtaatcgattacatggtcatcagtagtgtagtttttgaactcagctcgaaggtaatcgattattccgttgtgtaatcgattacatggaagagtgagttcctgtgagttcttgtgataatcgattattctagcttgtaatcgattacctagttttgggagctcctgtgataatcgattatttggtgagataatcgattattttgttcatgagtcagtttccagactgatatgagcaatgtaatccattaccaagagttactaatcgattatttacttcaaaataatcgattaccattcaaaataattgattaaaaccatttttgctacagaggcgctatttttagtttttaaacagctgtttggatagcttcccttggaagctacatttgtatttcatttaggatgcatttacatttcattagcttatagtttcgtgacctatataagctacatttcaataggttgtaggaactttttggttaaatgaaattagaatgcactttgtgtgtgagaggttgagagttattctcccttgttcttagtgaagaacttattgtttcttatcaatagcttctgagctattgtggtgattcttgcaagacttattggaattcctattccatggtgtcaatccaaatccacttctaatcttcttccattgttccatttctcaaatcacaaaaacctaaaagttgtccaaaatagagcacttcatactctatttttctgtccattgaagaattgattccattgcaaggaagatcagggcaaatagaacttgattcagttcaggagtccatcatttggtatcagagcttaaaccttgtggaatgcttcttcaatttcaatcttgggattcttcaaaggtaaaattctgcattagagtcaaaaacgaaaatcattagtaattccttgtttcttgatgttttcttgtgattctttgtgctgtagttttgttaagtattgcattacaaaaaccctaggttttcttgaagtttccttgtgaattcaggttcttcatgtttgtcatgttcttcatgtgttcttcatagtttttctaatttctagctttgattcttgtcaatttgtgttagtattgttgttgtgctgtgtaatactttgttttgatttcaatttcgtgcttgatctagagcaagtgttagaaacaaaaagaaaaacaaaaacaaagagaaattgcatcaaatgttattagaaagcaaaagaaatagtgaaaagtagctgaaaaacagaaaactagaagcaagctacaaaattacaagttttcaaaattgctagaacaacaaaaacaactaaaagtgtatgacattcagaattgatgaaatgtttttcaacaattgaattagtggcatatcttattgtgaagtttgttaaatctgaagtattcttggagttgtctcataaattccaatttgagtagtcctttctaaattgtactttgttgcttgtctctttaaaatttcaaaagtttgtcttagaagttttcttttctttggactcttaagccttgtctagaatcatttcatatttcactatagcaaagaggcttgattggacttgaagtttttgcctaagaactaaaaagagaataagagtggaaaaaggcaagagagaatattatagaaaaagccttggaagtgtgcaaacacgagagtgagagtaaacacttagagagtggtgaggaatttcttatatatacttgtgttttgctaacaatttctgtgaaggatgagttcaagtggaggagatgtcttgtcacctaaaacttctaggttgatgagagccatgactatgaaaatggagaaattgcaaactagaatggatgcaaaatttgaagagttgcaaaaggagaaaacaagaaagagtagttctacgggtagtgtggatggattgggtgatggtagtagaagggggagtgattttgcttcttcttatggaggaaattattatgatgaaaggaggagacaacatgatagaagagaaaatcataggagacattatcctaggaggatgaggagagaacatagagtagatgaagataggaggatggagagagatgaaaggaatggaggactgggtggaatcaaaataaaaattccaaaattccttggcactaatgatcctaatgaatactttgagtgggaaatgaaggttgaacaaattttctcatgtcaacattttaaggaagacaaaaaggttactcttgcaactatagaatttggtggttatgctttggagtggtggagccacattcaaagagatatagttgggggaagaaggcaaagagtaaattcttgggaagatttgaaagcaagtttgaggggtagatttgttccagcttattagtctagagatgttcacaatcttcttcaaagacgtttccaaagttccaagagtgttgatgagtattataagaaaatggagttgttaatgatgagagctagaattgtggaatataaagaagcaactatggctaggtttattcatggtttgaatagagatattcaagatgtggtggagctatattcttatgacacaattgaggacctagtgcataaagctcaaagggtggaacaacaaatgaaaaggaggaaaattccccattccaaatctagtagggctgcaacttctagttggagagagaagccaaaaggggagaattctcaagttaaaagaagagaagagaaggtagaaaagccaactaaaaagattgaacaagtaactccaacaaaaacgggaagcatcaaatgcttcaagtgtctaggaagaggacatattgcttctcaatgtcctaataagagaactatgactttgctagaggatggtaagatcacaagtgaatcctcaagttatgcatctagttcttcaagtgagaaagaaaaggcacttacacttgtggaggccgaagagagagatcttttaatggttagaagaatgttgagtaatttgtgcctagataaagaggagaatcaaagagaaaatattttccacacaagatgcttggttagagacaaagtatgttcactcatcattgatggtgggagttgtactaatgtagctagcacaagaattgtggagatattacacttgcgtaccacaaaacatccaaagccatacaagctacaatggcttagtgaaagtggagaagtggtggtaaattctcaagtgctcattcctttttctattaatgcttatcatgataatgttctttgtgatattgttcatatggagactggtcatatccttcttggtagaccatagcaatacgataggaaagttgtacatgatggcaaggaaaatacttttgtgtttgagcataaacgcaagaaaattattttgagaacattgactcctagacaagtgtgtgaggatcaaataaagatgaaagaaaagagaataaaagagttggaaaaaattactgcacttgaaaagaaaaaaagcgtgttgtacaaaaaggaaaatctagtgagaaaagaagaaaggaaaaagaaaatagtaacaaaaagattcatgagataaaagagagcttcttcttgagaggaaaagatgtcaagagagtgttattaacaagacaacctcttcattatatggtttctaagtctctttgtttacatgttgaaagggaaggagaaaatgtgccaaaagttatgcaatctcttttggaggaatatgcaatctcttggaagcaagaacatggaattgcttccaaactttgaaagataaattgtcttatgcacctattattaaattgcctaattataatgcttcttttgaattgaaatgtggtgcatctaccataagcattggaggggttttgatgaatgataaatatcttattgcttattgtagtgagaaattaagggatgcatgtctaaactattccacttgtgacaaggagttgaatgcatgtgatagagtcttgaaaacttggcaacattattttttaccaaagaaatttgtgttccatagtgatcatgggtctattgattatttgcaaagtcaaagcacatgcaataagagacatgctaagtggtacatcaagggcaatttgagggcttgggaggtgtgtctaccttatattgagtttgcttacaatagagtagttcacaaaactacttcattacctccttttcaaattgcttatggcctaaatcctttaactactcttgctttattgccattacctaacatttctactatgatgtttaaagtctcttatgttaggaaattacattagcaagtaaaaggccatgtggagaggaaattggcacaatacgctacacgagccaataagcataagtggaaggataaattccctctagagaatcttgaattgcaaggtgagtatggtgagaatattactttcaatatatgtgatctttccttgtatgatgcaggtccaaatgaagcaataaatttgaggacaagttcttttcaagaatgaggggatgatacaatcctaaaaccaaggcaactgaaggaagacttggaattacacatggaggcacttccttgggtgattaaaggaccaatgacaagggataaagctcaaacactccaagatcatatacaatccaacctaaatctcttggagaaccatgaagaaggctacaaaatgctgaatttatctattgtaatcgactacaagtagcctgtaaccgattaaatacacttgtataaatgtcagatttgtaaatagttctgtgataatcgattacgagtcctatgtaattgattacatggtcatcagtagtgtagtttttgaactcagctcgaaggtaatcgattattccgttgtgtaatcgattacatggaagtgtgagttcctgtgataattgattattctggcttgtaatcaattacctagttttgggagctcctgtgataatcgattatttggtgagataatcaattattttgttcatcagtcagtttccagactgatatgagcaatgtaatccattaccaagagttactaatcgattatttacttcaaaataatcgattaccatttgaaataatcgattaaaaccgtttctgctgcagaggcactacttttagtttttaaacagttgtttggatagcttcccttggaagctacatttatatttcatttaggacgcatttacatttcattagcttatagtttcgtgacctatataagctacatttcaacagattgtaggaactttttggttacatgaaattagaatgcgctttgtgtgtgagaggttgagaattattctcccttgttcttagtgaagaacttattgtttcttatcaatagcttctgagctattgtggtgattcttgcaagacttattggaattcatattccatggggtcaatccaaatccacttctaatcttcttccattgttccatttctcaaatcacaaaaacgtaaaagctgtccaaaacaaagcacttcatactctgtttttctgtccattgaagaattgattccattgcaaggaagatcagggggaataggacttgattcagttcaggagtccatcatttcttggttttgaaagtgattaagatcctgacctctaatttgaattagttttaaaaataccaaggttttaaccaattcaccctcctcttggttattgtgggtattcctattattttatatctttgcttcaaaaagaaaaatgaatacctcacaaataaccttaaaagaaggtgcttctctaaacagacctccaatgtttgaaggggagcatttcaatttttggaaaaataaaatgaaaatctttattcaattaaatgacccaggtgcttggaatggtatagaaaagggtccttttattccaaagaaaactgttgacaatgaaatgattcccaaagaatgggatgagatgacaaatgttgaacaaaaggttgtccaatatgattttaaagctaaaaatatgatcacctctgcactttcttctgatgaactttttagaacagtgagatgcacatgtgcaaaagaaatgtgggagatgctggaaataactcatgaaggaactaaagaagttagaagatcaagaaagcatgccttgatccatgagtatgagatattcaagataaacaccacagaaagcatttctcagctacaaacaagattcactcatattgtcaatcatcttttgggtcttgggaagatctttgatactgaaaaactaaacatcaagatcttgaagtgtctcacaagaccttggcaaccaaaggtgatagcaatcaaggaatcaacatttatgttgaaaatgaggtaattgataatactctctcctacaatagccaaattaaggagaaacacttgaccaagatgggtatgaggaaaaccccaaatggttgggtgatggttgcccaaattggagctgttgctcaagaaggggagatggctgctgattcagagaatgaggaacaaccacagcaacaacagcctgcacagcaagccttcacagattttgaatcattgatgattcaaaagatggactcaatgctgaagcttcaagaagacttcaaggctgaaactcatgaagccttagaagaaatcagagaaaggcttgattcaattgaggcaaacatggatgacaaagcctctgctgaattctaggattttagtttatagttttcctagtttatgtttggtttttatttttgtttgtaatgaactttgttatgttttgtttcctttataatttggttttgaatttcctttatgtactgccccatatattaatcatattaatgaaacatgttattccagttttaaatccgctatgcctatcctatttttgtcttttaacaagccaaatagggggagaattgattaagggggagtggtatcaaatacactctgtttgcccctgtttttgggttcaatttttgccaaaaatttgatctaagtatgtgctggaatttagggggagtaaaggtgtattaaggaaatcaattaattggtataatgcttaattgaataattcatgagtatgtgctttaacacttgattcttggcaaggtattgaaaattttaaaggttcataaaagcttgttcaacaatgtttttttcaaattgatccccaagtatttgtgcttattcaaattgaagatttggcatgtttaaagccaaaaagggggagattgttgattcaagtgaagtcaggcatcaatgaacaaagatcaaaggctcaagtgttttgtgctttcaacacgctcaaggacaaagtaccaagaaaagctgaagatcaatttgattaatgtaaaaggatgtttatgatctgataatccaattgagcatatcatgcatgaatcattcatttaggattgttagattaaaaggattaaataaaggctaattataagtaagtttttcaattagcaaagtttttgaaaaaaatgaatccttactgcattaatcgattacaagttaatgacatcgattatattgttctttgtgcctttagaaaaacaaatcatgatcattgtaatcgattacatatcggattaatcgattacttaggctttttatgagagatagaactctctgacttaatcgattacagaaattggtaatcgattacatgcatgcttaggaaagcaaagcccattgacttaatcgattacacatcatgataatcgattacaaagtacatttagaaaatcatgtctaactggtttaatcgattacttcacgaaataatcgattatattgttcatagctcaaacccagaacttattaggagcattttaatcgattacaatcttggtttaatcgattacatatacgaaataattgattactggggcgggtttaatcgattattttcagttagaaaactgttataaatagaacccattattctgagggttgtaatttttaagattttgaattctgggcaatcaaaaatggtcttgagctttcattagtgaattttctgagtcactgaacactcttaggcttcacaaattcatatgattatttgattcaagagagtgaagcatcattgttcatcaaagcataaggaaaggaatgcattgagtcagtaatttgtcattcaatctgttgaatcattcatgtgcatgaattcttggattatcaggtgatatctttccttattctttgaaggtgtaaaactgttatttgaatttctgcaaagattagtcttttgtaaatgggtttcttgcaaggttagagatagtatttctctaaggacagctgggtagtgttctcagtgtgggttttggtctctaaagggtctaatagtgttttagacttctaaactttatctagggttgataaagagaggcttgtaattgcttgtaagaatatttttgcaatagtggaactttactctagtgttgagtggaagaactggacgtagcttcatagtgtttgaagtgaaccagtataaaaatctgtggctaatctttcttctcattcattcatctcttaattgctttgtttgtgaatcattctcatagcacagaaagttatactctgttttctattcttcttgaaaaaggaatttgattgaatattgattcttggttttgaaataatttttttaaagtgataaagatcctgtgaaaaactctgatttgaaattttaatttaccaaggttcaaccaattcacccctccctcttggttgatttgaagtattctattcattttcaattggcatcaagagctggttcttgtaagttactcaagatcactttttcttttcaaaaaggaaaatgaatacttctcaaataaccttcaaggagggtgcctctttaaacagacctccaatgtttgaaggggaacacttcagtttttggaaaaatagaatgaaaatctttattcaatcaaatgacccaggagcatggaatgcaatagagaagggtccctttattccaaagaaaaccgaggcaaatgagttgattcccaaagaatgggatgagatgactgaggctgaacaaagagctgcccaatatgattttaaagctaaaaatatgatcacctctgcattttcctctgatgaatttttcaggactgtgagatgcacaagtgcaaaagaaatgtgggagatgcttgaaattactcatgaaggaacagaggaagttcgaaggtcaaggaagcatgctttgatccatgactaccaaaatgttcaagatgaacaccaatgagagcatttcacagctgcagaccagatttacacacattgtaaatcacctgttgggtcttggaaaagtctttgatactgaagaattaaaacatcaaaatattgaagtgcttaacaagaccttggaaaccaaaagttacagcaatcaaggagtcaaaagatttgtcaaaaatgtcaatggctgcattgtttggtaagcttcttgaatatgaattagaaatgtctcaattaacatcttgtgaagatgcagaaaagaaaacaagaagcatagccttgaaagctgcaactttgaaagctgaaaaggaagaggaaacaagtgaagaggatgatgaagataatgtaaacttggtggtgaagaagtttagcaaatttttgaggaaaaataagaataaaaggttcagcaaagggaacaaaaacagcagtaacaacaacaacctcaacaagaagattgacaacaatttcacatgctttgagtgtgacaaatcaggtcacatcaaatctgagtgttcaatctacttgagaaagcaacaaggtgaaagcaagatgaaaaaggagggaaaaggaaagagggcatacatagcttgggaggataatgagtcaacaacttcagattcttctacagaaaatgaagaagccaacatgtgtctcacctccaccatcaatgaagatgatgatgatttgctatgtgatggagatgaggtaaattctgaacttgaccaagctattcatgcttttcaagaaatgtatgaggaagcccaaaaacttgcaaaatccaataataagctcaaaggaaatcttagatggcatattgagaaaataattgaattgcaaaatgagatttgcaacttgaaagaagaaaatgaaaacttgtttcaagttacaaattaaatggatgtatgtgtgcttcttcctctagcaatgttgacaagtataagttgcttcaaaaggattttgatgagtataaacaaagtcaaggtgaaaaatatatgttgcttttagccaaaaactgtgatttgattgatcttttgagaaagctttataagggaaaatgcaacttggctgaaatgttgagtgtgcaaaaatatgctggagatacttctggtttggggtataaacatggaacaaaatcatttgtaaaaacagtttttgtacctccaaaacagaagaatcaaaagtggcaaaagaactcaagagtcaacaaatattctgattttgggaaaacttcaaaatctatcacttgcaactattgtatgaagaatgggcacacatcttttaaatgctatgctaggagattctatgtgtctaatggtgattgcatttggattcccaaagtaaaaagaaatgctaacccttatggacccaaccttgagtgggtaccttccattaaattctgatttgaattttgtagatgtgtctaagagctaggacatcaacttggtatcttgacagtggatgctctagacacatgattggagacatgtcccttctctcaaatctgactttaaaagaaggaggtcacttatggtgataataacaaaggaaagattattggtgaaggaaatattggagacaacatcaaatcaaagatcaaaaatatgttgtatgtggatggattcaaacacaatttgttgagcataagttagctgtgtgacaaaggcttcaaagtaaacttcaacaaggattgttgtataatttctgatgagaaaagtggtgaggtactgcatataggtaaaaggaaaggtaatatatatgtgctttcaattgatcatgcattattccatagatcttcatgtctaattagcaaagttgattaaacttggctgtggcatagaagagcaagtcacataaacatgcatcacatgaacaagctcattagaaaggatttagtaattgggttacccaaactcaaatttgagaaggacaaactttgtgatgcttgtcaaaaggggaaacaaacaaagaactcttttcaaagtaaaaacattgtttccacctctagaccacttgaactacttcacattgatttgtttggtccttcaagaactatgagtttaggtggcaactattatggacttgtgattgtggatgattactctagatacacttggactctgtttttgaaatccaagagtgatgctttccttgcttttagaaaaatggccaagcttactcaaaatgagaaaggatgtaaaatagtttcaataagaagtgaccatggtggtgaattccaaaatgaacattttgaaaaattctgtgaggaaaatggaattaaccacaacttttcagctccaagaacaccccaacaaaatggtgttatggagaggaaaaatagatctcttgaggaaggagctagaacacttcttaatgaatcaaatttacctaagtatttttgggcagatgctgtaagcactgtatgttatactttgaatagattacttataaggcctattttaaagaaaactccttatgagctatacaaaggaagaaagcccaatatttctcacttaagagtctttggcagcaagtgttttgtgctgaacaatgggaaagaatcacttggaaaatttgatgcttaggcagatgaagcaattttccttggatattcattgcatagcaaggcatatagagtattcaataaaagaacaatgtgcattgaagaatctgtacatgtgatttgtgatgaaactaatccctctaaggaggaaaaagagttggaaggtgatgcaggtcagctggaagaagtaattgaaattgacaacaccttaaccaaaattgaagaaccaagagctgaaacagaatccacaacccctgttcaagtgcctaaagattggagaacaacaagagacttatcacttgacaacataataggtgaagtttcaaagggagtatctactagatcctcattaaagaatctatgttgtgatatggcttttgtttcacaaattaagcctaagaacattgatcaagccttgagtgatgaacattggatgcatgccatgcatgaagagctcaatcagtttaagagaaatgaagtttgggaacttgttcctagaccttcatctcttaaacccattggcacaaaatgggtttttagcaataagcttgatgagagtggaatcatagtcagaaataaagctagattggtagctaaaggctataaccaagagaaaggcatagactatgaggaagcttttgctccagttgcaagattggaagcaatcaggttattacttgcatatgcatgcctcattgataaacacgctgtcgacacgcaccaaaacaattttactaagctaattctgtagcacagagctaacctaggtcgactcagagacacgatcaatatggttctagcttcaattcaatggcaacagtaagggggggaaattttaacaaacagtttgtatgcgtaagtaaaacttgcaaaacgtaaactaaaattaaagagcaacacagaaattagcaatattatcaacaagtgagtaaaacagattagagaagcatcaatccaattcaccaaaccaagcaatttgaatcatcatcattctcagaattttatcctatcatgaacatccattcaatctcattagaagttgttcaatcgaattaacccctaatttaattgaaactacaaccctaattgaaatatcatccaattaattctgtgattaatatttgaaattaggcatgaatccacaacctaatccggtttcaatcctaaatgcattcataatcatgaaaaacagaatagcaattgaagaagaagatgaacattcaagtagaattcgaaatactaaaccagaactccgattctccttgtgccttggttggttccttggattgattggtgatttagccttccatgatcatcatcaatgaaagccccatggattgagtgcacgaaaatggaagaacagaaaaacgaaaatgaagaacaatgaagtaaaaggaagaacagtagagagaaaatgagagcaagggttttgatctaaaaaactaaaggaaaggaaaataaaacttgtttattgaaattgtaaagagtggtgtgtccaagtctcactaaagtcactaatatgtagtgactgagttctgaaaacgaaatgggccacaaacaagcccaacaatctaattatttgctaattacaaccatgaaagtcaaattcgcagcccaaaattacaagtgcagaggtgttaacttcaaagttaaaaatgaccctctaaatgacagaattggcctcgggctatttgtatcaaacttgtagatcttttcgttatctttccagggactcctagaacgctccattcggagatcggtagctccctataggtcctgcacaagttagatacgttaagtgagcaaaaatccgaaaatacgcaacaattagtaattaagcccacttacttgcctaggcccaaaaactgaattagaataggaaaataagggtcaaagagaggtcaaataagctaagaaggatagaaaaatattcaactaaaaaccctctatcactcatggatttcaaacttttgcaaatggatgttaaaagtgtttttttaaatggatactgtcgcaaacaagtgcaacggcaagtgcaccgatcgttttcaagtaataaagtcaagtaagtgagtatcgttctccacagggattggggtaattccacagtaatactaataagtgtgattgaattaaaacagaaaattacgcaagaagtgtttgattgattggttgttgagtgccaaaacaaaaattaagtaaatgcagtaaataaatttgagaagttaccaatggaaagacaattgtggttaggcacaatcccctcagattcctactctttcacttgactggttatttaacattaatgtacacaaataataaatctcttctatattcgtaaatcctagataactagcgatttcactctttaattcgatcaagaaccctaaacctttagcgattctgtcaagttaagcatttagagaatatattataagaggttcctgttattaattgttcagaaataagtctttcctagattagctaatccctaattccttagtgaattaactctttaacctgaatcgaaaacctaattccttagtgaattctatcagttcaagcattcaaaagaacatatcctagactctgcagctacgcacccctattcctaggtgatgaacaactgttattctaaacggttcagaaattaaaaccccaacgttcccattgtgaatcttaatcctatgtacttaattgaagtgatcaaattcaaataagaatgaaaataagtgcagaatagaataaaacaattaaaacatatcattcaataccagtcaaattacagaggagttatcatcgattcatggccttcccacaataaaatgtttagccagccataggcctcaagaaaatcacagcagtaatatgattcattgttgtgcagaactcagcttaattcttgattcctagggttttagaggatgaagaatggatgaataatgtgtattcaggctattctggatgtctagactcagttcagaggcttcatatatatagataagtttaattaaagtaataaagcctattcctgtaacaccccgtaggcctccagtgcgttatcattatgatatcagttagcgcttaaaacattcatttaaaacttagcagaagcacaggatcgattttcctgattcattatgtatggaaacccagcatatcacaaacacacacacatacaaaaccatatcatacccctgctgatccagtttatctcatacaatacacatatagacagattgcttattcagataggcagataactgaaaaacatccaatataagctcaggagaatcatataatatacatcaatagttctgttcatcaaatatacatcaggtcttcaccatgtcatggtgatccaaaataacatcagccctcacaagggtatacagaactatacacgtcatagggtacatacaccccatccctatcaagggaacaaaatagaaacaaagccaaaaagagctcgcagctctccttgctgcttcccattcagcagcatgtcatctctagggcctcctgccctgcatctgttcttctctcccagaagaatcacctgaaatcataagccccacacggggtgagatacacatctcagtaagctcagggtccttggaggactttcctccaccctggcccacttccataacacatacattaggcatacacacaaatggcccaccggcctagcatatcaggtcctcataacaacatatcaaacatccaaacaagtcaagcaatggcatatcatcatcaacgccaggatgcatcatcatcatcatccatcctcagtgtgagaccggcactcacacctatgtcatcccattgggtgctacccttatcatggatgcacatatatggtacatccgagaataggcttcaaccgcgacgagacacatctatctcttggtcttaagggatcatcatcacccatgagcaaaccaaactaggaggaaaccatctcctaaggaggtccatatctatccgttggccaacagatctaaccacagtcatagcacagaatcacaagcatagatgcgcaatcatatcattatgaggatgcaaactaccaatgcatgcagtatggaataaccaccacttccccggagtgtggtgtgcaaaccagatgggaaataatccccagggacactgaacttacctggcaaagcctcgctctgcagttctttccctggtctgtggctcccgccaccaaccgtatcaagctcacggcctaatcaaggcacatgcaatatcatatcaaaaccatccatcaggcatcaagcacagaacatatcataatataacataaatcccctatcctagggtataaacaaactcagcccacaccaggctgctctcagaccacacaaggtccatcaaggcttattactagctatctgagtcatctcagactcaatacaatacaagcatggcctaagctcatcagtcttatagccatcaatcatcatcattggaaccagctaaacctcagcccagacaccattccaccagcctctcaggctcaaaaccaacatgaacaagctctggcttggcttgagaatcacaagtgaccttgtcataaagccacacatacaagccacagagctaaaattcaaagttatcaaaaacagaaactgaaagctaatccttcatctattcatcgctctgaacacatctctcaactggaccctgggctaattctagccccagcacaaatgggtcactattcatgaaacccctcagattcaaaatcaaacggagaaacttgtgtttcttacctcagtggcgactctaaaggcctcaggacagcttcctcgagcttctgtgtcctttatacaccgtgggtcttcgccaatctcaagctctctgagcttttcctctgagaaatcgcttcgcactcagaaaggggtttcaagagtggaaaatcgaaggattcaagcttccataggtttctctcacactcaaaggtcgaaaggaagtgtttagactctcaataagggtcctaaaaagctaggaaactcctctaatggaggtctggacgaaggaagaagaaggagagaaaatgccgtgattttcgggcttttgggccttttataggcccagacgtgactcccacgctgccagcgtggaatcccacgctcccagcgtggactggcagacaaaattgcacttctgggctgcttcccacgccccaggcgtggcctccacgccccaagcgtggacctcccacgcccccagcgtggggttccagaaaaatcatcatttctggcccactttccacgccatcagcgtggcactccacgccaccaacgtggaaccccagaaaaagccaaaaacaagctttaaagcatggttataacaattcctgtactaaatatcgaaccatataaattaaaacaggcaactaaatcaatatggcgtgacccgcgcgcgatcccgcgctacccgcgcggattgttcgaaagtcaagcgctgaccgtgtgacactccacggtaaccgcgtggcttgtttgagtcaattgacttgctctggtcttctgtggcgctgttggcgcgactgcggcgctgatggagctgacctctcgaataggtggcactgatcgcgttggcctggcgctactggcgtgagttgttcgagctgaatttcctggcttgttgtctttgacgctaatggcgtggatctggcgctgatggcgccatgcttgcgactaatccacgctagtcgagtgacttctcacgttggtcgcgtgaggtcttcgagactgtggcctccaatcattattatatttgacagctagcagacctgatataatgctcaatgtttgtttgtgtgctagatatcaagctaatcctaaagaatcttgtaatatcttgaattttaagcatgtaattaagcctagattaagcccataattaaggataataaatatgcttaagagtattcagaggaaaggcttgagaaagagatgaaataggctgagttaggggttttctggggttccacgcttggggcgtgggatgccacgcctgggacgtgggaagcagcccagaaatgccattttgtctgccagtccacgcttggggcatgggaagccacgctggaggcgtgggaagttgcccagaagtgaaattttgtctggaactccacgcttggggcgtgggagtccacgcttgaagcgtgggagtcacggcagaggcctataaaaggcccagaagctcgaaaatttggatattttcttcctccttcgtgccaaacctccattgatgagtttgagagcttcgtatctcctccatctttcatctaaacacctccgactcaactgagaaagtgattagaaccccgagaggagagaaaaaccccgattgattcttgagaataactgagaaacagtgagatttgatttctctgagagaacctttgagagctcggagtttagaggcaaaggaggccttgattgagcaagctaccttaggaaaagtgattccctggtgtttctgaacatcacagaggacatgagcttgagagctctggtggtgttgaccacgaggccgggagagccagtgagctgtctagagcaggtaagctcttagtccttgtttgtgtatcctctgctgtgttccaccatatacccagtggggttatggttctgatgtgtgtgtatgttagcagaggaatgatgtataatgctcaatatgtaatctgaacctaaagatgggtaattgatgtgtatggctagagttgattggtagcttgcttgattagatataaaactcgagaatgcatgctgtgattgattgatatcctattgtagtaggatagatgacttgagatggaggaagacctggtgagagatgagcttgtgatatggaggtagcctcctacgtggagatgatcccatatacacagatgtagccttcccaggcaattgtattgtgttagaggatgagatggccctgtgctacatagaggagcctcttgagaagagatgtgcctatgttcacagaggtagcctcaccaaaaggagatgtacctaatatatagatgagcctcttgagatagagatgtacctatatattcagaggaagcctccgctagggattcatgcaggagatttgtcgagtatatagaggtagcctccctgtgaggagatgatcctatatacttagatgtagcctctgcatgatggttattgatgtgatgaatggctgtatgccatgagtatgtcttgatattgatactgatgaatgtgtatgagatgagtccttgatattggatgattctttgagatgatagtacattgattgcatgtacatcgattgagtgattcattgatatggatactcatgttatgattatgtggtgatgttattgtgagtgtgtggtgcatgaatacaagccatgagcttgttctggttttcattgatagatggatatatatattgactgtatatgtattgattatttgtgactgatgttaatgatgaggataattatgtgatatgtatctgtggtcagtgaaccaggggaaggaaataccttcaagggccctgagtttactgagattttatatctcaccccgtttgtgggatttatgatgcaggtgattcatcagaagtagcagatagatcccaaggcaagaagcctatgcaggattagctactgacggacaccttagaatagaggacatgagcatgtggctcagatgttttgtgttttgtattttgatgtaccctgaggggatagtatatagttttgtattgcacagagaaacttatatgtatattcaccatattatagtgtacagtgctgatgatagtgaccctttggttatgtcactcatgtttatgcttccaaactgcttaaactctgattgttatattattgattgtggtttatgtttggtaatgaccctgattagaaaattggggcgttacaaatctgatggacgatcaatgcaagctaaagagctaggactcaagtacttcaagatcatatccaatctaacttgtatctcttggaaaagcaagaagaagccaaaaagaagcccacaaaagtagtggaaatgcaaaaggagtgttgtctgttttaacagattaaaagcatcctgtaacagattaaaagcatcttttctgatacctgtaatcgattacaagtatcctgtaatcgattaaatcagcctgaaaaatgaatgtatctctgttttaaacttctggtttaatcgattacttgaactcatccttcaaaaaaaatggttagcaaaacacaagtatataatgaaattctcaccactctctaagtgtttgccactctcactcgtgtttgcacactttctaggctttttctataatgttctctcttgcctttttccactcttattcctctctatagttcttaaacaaaaacttctaatcaaatcaagcttctctactagagtaaaataggaaatgattctaggctagactcaagagtccaagaacaagaaaactctaagacaaaaccttggaaatttaagagacaagcaacaaaagaaaaaaaatttgaaaagcacaactctaattggaatttatgagacagctcacggaatactataggttgtaccacattgcacaagaaggatatgccaagtaaattcaattgctagaagccaaatttcatccaatttgcatgttatacaagttcatttgattttgttgttcaaaggaacttttggaacttgtaatcttgtaactttgcttctaaattctatttttctttcaccttttccagccactactcaataatgtatttggctgtaacaatataatactaattgatttatttttctttttgcttttgcttttcttttgcacaagttcacaaattcctaaagaaattcaatgaatcactaaaatatgatgtataacaattgtaaaatttgtttctaacaactcaattcagtttaggcatgagagtagaatcaaaacaagtggtcatacaacacaaaaaaaacactacaaacaaaaattgacaagaatcaagactagaaaattaggaaaatatcaagaaaaatgaagaacatgaaatgacatggaacttgtagaacacactaaggttttgtggctgaacacacaacaagtccaaaccaccaagaatcaaaagaaaacaacaagaaacaaagaattgaaatggaattttcatttttgggtttggtgcagatttttacctttgaagaacttttaaaactgaacttgaagaagaattccacaaggattaggctctagataccacatgttgtaatgtctacaaccaatagacattaggtttcccaaatcttccttgcaatgaaacccaatcttcaagcaaactccaagaaatggacaactctgcactttaacggaatatgggcctttttaagagatttctaatttgtataaatggattgtggaagatgaataggaatgaattggaatgacaccatggaataggaatcccaataagtcttgcaagaatcaccacaatagcagaggagccattgataagaaacaagaaggttcttgaataagaacaagagagaaaccctctcaacaatttcagaattgtattaattgaatccaaaagttgttacaaacagttttggtgtggtttatatagcccaccaaattacaagctaaatgaccctaaatgtaagtaaaatgcaaattgaaatgaagcccaaatgtagcttgtagtgcaagctttgttcaaaatgacctttggcttcacaaaatcacgtttttgcataaacttctggtttaatcgattatttcgaccatgtaatcgattatttaacctaaataatcgattaattggtttggtaatcgattattttgctctaatccttcctggaaacagatttaggaccaaaataatcgattaattcgacatgtaattgattaaaacagagatactttcattttttaggctgatttaatcgattacaggatgcttgtagtcgattacagttatcagaaaagatgtttttaatctgttacaggatgcttttaatctgttaaaatagacaacactccttttgcatttccactacttttgtaggcttctttttggcttcttcttgcttttccaagagatacaagttagattggatatgatcttgaagtacttgagtcctagctctttagcttgcattgatcgtccatcagaatcacaccttactactgtcaagagaattctgaaatatctcaaagctacaccaaaagttggtctttggtatccaaaaggtgtttctttaaatattattggttattctgattctgattttgcaggttgcaaattagataggaaaagcacaagtggcacttgtcatctgctaggaagctcattaatctcatggcattgcaagaagtaatcctgtatggcattatccactgctgaaactgaatacatttcagctggaagttgttgtgctcaaaacttgtggcttaaacaacaaatgttggattatggagtggaactgaatgctattcctctgctatgtgacaacacaagtgctatcaacatatcaaagaatccaataatgcactcaagaacaaagcatattgagataagacatcatttcctcagggatcaggttcaaaaaggtaacataaaggtagatttcattgacaccaatcatcaattagctgatattttcacaaaaccactatcaagggatagattttatacacttagaaacatgctagggattcttgatgaaagcaacattatctagtgttaggatttttataccacgacaagcgtaccgttgttatcgctgtaagtttcgaatttataaaagttcgtctccacagggatttgggtttacgtcggttgatttaaattaacagtttagtagttatatacagatgataaaaaacgaaggttcatttgttgttgcgaaaaatgtaaaataatgataacgaaaaccaaacaaacgattacgtgaaatgaaataaataaatgggtacaagacaagtaaatgtaggattggatttcgtcttgcttatccctttttaattgattttacctatgcatgttctattcttattgccgcacatgtctaagtaaccctaatttgattcctcgcaattacggtcctatggatattttactaaatatcgatccctcgcatatttaattaaatacccaagcattaagaattttaatcaagtgtttaatgcgatcgaaacattaagccctattcctagcaacgtaacgtaacgagtgattaaattcagttcaaaccctaaatttactttccagtcgcctttagggttaatttcatgaaactaattgttaagtagaatcaagcattaagcacagaataaaatcaccaacaagaaatagaacaatgcataaataattaaaagagcatagggataagaagagtacgtccaatccttagggaagtttaagcgaacatgggcagaacctcctcgagagaatcaccgactaagctcgtcatcgaccctcttttcgacagaatctccttacaaaagtcactgaacctcacttccctaagttctacactcacttaggaactacaaaagcaagaaacaagacaagttggtgcctttgagagatttggagtgaaaagcatgccttgctcacaaatttcgtcccctattaataggtattggccaactgcttggtccactcgcccaggcgcctagtttagcctaagttcactcgcttgggcgagttaaggctgctttcttggaacttgtgagtggcctgggcgaccaaaacacacatgggaggctagccagggtgacttgaaagcttaatggtgaagaaattgatgggccttggtgtctgttgggcctggtttgctgtttaagccttcttcctttgcttagtccaccccatgctcctagtttagcaagcttggttctttcgtaacctttaaacctagcaaaataaaaacattcgattggacgaaatcttctcgaaacataaaagcatgacttatctttacataatcagcatttgactaggtttctagggttatcttgtgactaattcaattaaactaacggataagtgccatattgtaatcctagttttactaaaatgtggcacttatcatctagcttgttttatttgtggtttatgtgatgtttgaatgcctatatgtcatataatgaatatgtgtttggatcattgtcaaaaagctgctaaaatactctgtatctgatatattcactgtaataatcgattacactatgggttaatcgattaaaatcattaaaaatcagattaggaacgaaattagcactcatgtaatcgattacacaagaatggtaatcgatcattcttcacattgtaagaaaacacctatctctggaataatcgattacatatcggaataatcgattacagtgttcaaaattccaaaactacagcctgtctcactgtaataatcgattacatatgagttgtaatcgattaccattcatatttgaattgatgctctctctgtgataatcgattacctatgaccctgatacttgaataactgattcaagctttaaaataatcgattatctaagcaaagaatcgattactggtcatcttcaacctttggctatggctaatataatcgattacctttgaaattaatcgattacctcgtgttttaaaagaagctttattgaattggaataatcgattacggcaaaaaaaccaataaaatacaaaaaaaataaaaaattaccaatatggggcaacaggcaaactatttacaaatatggggcaactggtcacgcccagaactgggcatgactggtcacgcccagaaccaggcgtgactaggggggtagtcacgcctggttctgggcgtgaccagtcatgcccagttctgggcgtgacccacttctgccacgtgtcatgcacatatgaaccgatgcgtatataaacttcggacggtcataacttttgactggattgtccgattcaggcataatttgtgtcaaaacgctcgaaattgagaggagaagccctggacaaattttcgaaggggatttggtcaaaaaaaatttccaaaaaatgtttctaagtgcctcaaaattatgatttaatcttcgaacatctaaaaattttcttgttttctagatgttaggttcataggaaattggtagtgtgtatgttggtttaatgtgtagtgtttacgatttagggtttgggttaaagaggtagcgtttatggatttcggtttaattttagggcttagcgtgttagtgtttagttgttagggcgtgtgggtatatgggttagggtttagggtgtgtggatatatgggttaggtttgagggtgtgtggatatctgggttagggtttatggtgtgtggatatgtgggttagggtttagggtgtgtggatgtgtgggtcagggtttagggtgtgtggatatatgttatgtttaaaccaatgtacaccgaacccataaatccacacaccctaaacactaaatcattaacctaaaccccccaaaaccctatccactaaaactaaaccgaaatccgtaaaccctaaatctttaccccaagcccccaaatcttaaacacaacataaaccctaaaactaaaccggaatccataaaccctaaatctttaccccaagctttaaaccctaaacataacataaagcctaaaactaaactggaatacataaaccctaaatctttaccctaagccctaaaccctaaaactaaaccggaatccataaaccctaaatctttaccctaagccctaaaccctaaacataaaccctaaaactaaaccggaatccataaaccctaaatctttaccctaagccctaaaccctaaacacaacataaaccctaaaactaaaccggaatccataaaccctaaatctttaccccaagccctaaaccctaaacacaacataaaccctaaaactaaaccagaatccataaaccctaaatctttaccccaagcgctaaaccctaaacataaaccctaaaactaaaccagaatccataaaccctaaatctttaccctaagccctaaaccctaaacacaacataaaccttaaaactaaaccggaatccataaaccctaaatctttaccccaagccctaaaccctaaacataaaccctaaaactaaactggaatccataaaccctaaatctttaccccaagccttaaatcctaaacagaacataaatcctaaaactaaaccggaatccataaaccctaaatctttaccctaagccctaaaccctaaacataaaccctaaaactaaatcggaatccataaaccctaaatctttaccccaatccctaaaccctaaacacaacataaaccctaaaactaaaccgaaatccataaaccctaaatttttaacccaaaccctaaacataacatagggtttatggattccggtttagttttagggtttatgttatgtttaggttttagggcttgggttgagatttagggtttatgtattccggtttagttttagggtttatgttgtgtttagggcttggggcttagagtaaagatttagggtttatggattctggtttagttttatggtttatgttgtgttaaagatttagggtttacggatttcggtttagttttagtggatagggtttgggggggtttaggttaatgatttagtgtttagggtgtgtggatttatgggttcgatgtacgttggtttaaacacaacatatatccacacaccctaaaccctgacccacacatccacacaccctaaaccctaacgcacatatccacacaccataaaccctaacccagatatccacgcgccctcaaacctaacccatatatccacacaccctaaaccctaacccatatacccacacgccctaacaactaaacactaacacgctaagccctaaaattaaaccgaaatccataaacgctacctctttaacccaaaccctaaatcgtaaacactacacattaaaccaacatacacactaccaatttcctatgaacctaacatctagaaaacaagaaaatttttagatgttcgaagattaaatcataattttgaggcacttagaaacattttttggaaattttttttgaccaaatccccttcgaaaatttgcccagggcttctcctctcaatttcgagcgttttgacacaaattacgcctgaatcggacaatccagtcaaaagttatgaccgtccgaagtttatatacgcatcggttcatatgtgcatgacacgtggcagaagtgggtcacgcccagaactgggcatgactggtcacgcccagaaccaggcgtgactacccccctagtcacgcctggttctgggcgtgaccagtcatgcccagttctgggcgtgaccagttgccccatatttgtaaatagtttgcctgttgccccatattggtaattttttattttttttgtattttattggtttttttgccaatcgattacattacgaaataatcgattattcacgctgttgtatgaaatctgacaggtttttatggagaatctaactgcccaatctattttaaaaccaaccctatgtcattaaaccgtcaccaacagctatattttttgaaattatggatattgagaatctgaattatgcctatatatagtggatttcaagcgttgattcattgcaccaattctcttcttctcctctgcattttttctacacactctctgagtctaaaccttgtccaaaccattaattctcaccatgtctgaaccatcctctaaaaggattaggaaacccaagagaaaaccaggagaatcattttctaatccccctgtccctcaacccacaaatagactagatatctggttctcctctaagacagatcaaatgaattaccttcagttcaatgccactaagcctgtggcaactcctaagtatattgaactagattggttcattaggcaaggattccaatttcaagcctttttagattctcaaagccttaggagattcctagagatgaagggtaccttctaccctgacttagttaaggtcttttatacttgtttgaagggttctatgcaaggggacatgaggtccaaggtgaaaggagtgatcatgcacataacccctaacatttgggagactgttggtgggatagtttgtgagggagcccgtagatttgatgaagatcttgagggctatagtaaaatggatacatataggggtatgcttcatgatcctcacatgaggcttagtacaaggctcagcactggtccaatgactgttgaggacagaatgcttccttacttgatcacctacatcatcacacctaccaaccatgcccaagcaactgatgaggatcttcacttggtttatgggctaaagcatcatattcccatgaactgggctctgattttttaggaaataatgcttaagtcaaagagattagtgaattatccatttccctatcctgtgtttgtgtctaggcttattgatcatttcaacattgatgttgaaaatgaggtaattgataacactctctcctacaatagccaaattaaggagaaacacttgaccaagataggtatgaggaaaaccccaaatggttgggtgatggctgcccaaattggagttgttgctcaagaaggggagatggctgctgattcagaggatgaggaacaaccacagcaacaacagcttgcacagcaagccttcacagattttgaatcattgatgattcaaaagatggactcaatgctgaagcttcaagaagacttcaaggctgaaactcatgaagccttagaagaaatcagagaaaggcttgattcaattaaggcaaacatggatgacaaagcctctgctgaattctaggattttagtttatagttttcctagtttatgtttggtttttatttttgtttgtaatgaattttgttatgttctgtttcctttatattttggttttaaatttcctttatgtactgccccatatattaatcatattaatgaaatatgttattccagttttaaatccgctatgcctatcttatttttgtcttttaacaagccaaatagggggaaattgattaagggggagtggtatcaaatacactctgtttgcccctgttttctggttcaatttttgccaaaaatttgatctaagtatgtgctggaatttacggggattaaaggtgtattaaggaaatcaattaattggtataatgcttaattgaataattcatgagtacatgtgctttaacacttgattctttgcaaggtattgaaaattttacaggttcataaaagcttgttcaacaatatttatttcaaattgatccccaagtatttgtgcttattcaaattgaagatttggcatgtttaaagccaaaaaaggggagattgttgattcaagtgaagtcaggcatcaatgaacaaagatcaaaggctcaagtgttttgtgctttcaacatgctcaaggacaaagtaccaagaaaagctgaagatcaatttgattaatgtaaaaagaagtttatgatctgataatccaattgagcatatcatgcatgaatcattcatttaggattgttagattaaaaggattaaataaaggcagattataagtaagtttttcaattagcaaagtttttgaaaaaaatgaatccttactgcattaatcgattacaagttaatgacatcgattatattattctttgtgcctttagaaaaacaaatcatgatcattgtaatcgattacatatcggattaatcgattacttaggctttttatgagagatagaactctctgacttaatcgattacacatcatgataatcgatcacaaagtacatttagaaaatcatgtctgactggtttaatcgattacttcacggaataatcaattatattgttcatagctcaaacccagaacttattaggagcattttaatcgattacaatcttggtttaatcgattacatatgcgaaataattgattactggggcgggtttaatcgattattttcagttagaaaactgttataaatagaacccactattttgagggttgtaatttttaagattttgaattctgggctatcaaaattgtaacgcctctctttactttcccgtgcttgattgattttagataaaaccttgtgtccattaaaattagattaaatttttcgtgaaaattcatttcgctttgcttactgattttatgattcgtaagtaacgtaaatgattatcctcaccatgattcattaaaaatgagaagtataattaaatataacagtccttgtacagtcatccaaaataaaatacaaaccactacattcatagttccatacgaattacatagcttcaaaaagtagcaacttcaaacgatatcatccatacatcaagtcaaaacacagcatacaattcatccaagcttcttcgtatctcaccttttcactgttcttctgctcgcccaattaaattggggtcatcacaggtgtcaaaccacagacacaactcgggtaagtattttaataaacatgattaaataattgacaggaattaaaataacattacagacaataactgatttcgagtaaaataaattaatatttgtaaaatagaagcagatgcatgaaaatgatgcatgatctcttcatttcatgatgcatgactgagatctcagcttcacaaaatcatcatcagtggccacagtcagatagccccaatcactggtccagaacttgcatgatcagtcagggtgtcacagtggtgcacaggaaagtcacccacactacatgtgatcatcatgggtggcgtgagttcctcactgccgaagcaccccccagctcagactcctcattgtctgaacgctcatactcagttcctctaactatctgacacatatctccatagattaacccccgcaaggcatcaacaccacggattaacccccgccaggcatatgcatatgaaaaatgcatgaatggtttaattattcttctttatcatttattccaattttatatcaactaattccacccactccagtggaatacatatcagatagtcccacccgctccagtggaacacaaaataatcaatagtttattcttaaatcatttttgttacagaatctcaacaaagcctatcatcaagtgaatgttcacataacatacagctaaatcagcgacccaattaaatacagcatcttagatatagcaccataacatgcagccacacaatcaacaaataatatcttaacagacagccaaaataacagacaacaacatcaaaacagacaacaaataatatctttacagacagtaaaataaaatttaaacagcatcataaaaacagacagcaacccattaaaatatacagcattaattaaaatgctcagcaactaactaaaatatacagcagctaaatatacagccacatatacaacagcaacataacagcatacgtcatccagcttacgtcaacaactcaattaaatacagcaacaacaacatataatcttaattaaatacagcaaccttaaatttaaatacagacaaagattcttatggccaagaagtaagattaattattttgggcagccacttgtttattgggtaatcaaattatggactatttgctatcctagttcattgaggactttcaacaaacacatggtatgccaactttaatttttattaaacaaagaagaacatggctttaatcctaagagattggaggttgaattaacctaatcaactatctaattcatgcttattaagatactccccatacctttgctttgcttcctaaaattttggacagcttctatctttttccttggttcccacgtactagaagaatagctcttggtttccttttgaaggtatattttgaaggaaagtgaaagtaagaaggatataacaaaggaacttgcttgcacggtcacttttggtgtatttggaaagtgttttaattttgaaaggcaaggctttaggatttttgcatgttcacggttttcctcctcacctaagctgaattagtttagcttctaattgaaaagaattaggaatggaagtgggtgtggtctggtccgtatgccttctccttccttggtcccactacttttttatatgttaagctaaatatcttaagctttctagttggagactttttattggctgtccaataacttgcttccaaatactccaattcttgaattttctacttcctttaagctccatccgtgtaagtattcagctgaatgcttgtcttttattttattcctttcacgtgaaatagcttgtgtttgagaagatttttattgcccaaagtcataatgatacacttcctacttggtttattttgatttgtctttgctttcttgctccattaaccgtccaattgcccacccttctatatttttctacagccttcgtcatttatcttgctagttcacggccaagcatagattttaaggcaatatgttttagttttaggcttaaccgtggaatgctatgttttagagtttcttatactttgttttgcttaataaaattctttacatagactaaaattatttcgtacatttaggaaaatccaatttcaattgttcttttatgagtaatattctaaaattgtttagaaactagtttaggtctttgtgatatttttatggtgtaatctaaactttcttagataacggtttcttaattcctcattggttcattttgtttctaattagcaaaattactaacctagtttattaaaagagtttattcatcttaaaatttcaagaaaactctaaagatcataattgtttttgccacataattttctgatgcctgagatatcctaaattgaatttctttataagatgattttcaaaattcatagaaatctcattttataattctttgtttctttcttgatcaataattggttatctggaagtgttttatttcatacttaggtttccacagagtttccttacttatctgggcatttttgacctaaagggcattttggtaatttcacttctccttttaggggcaaaatcgtcattataaaaaatgttcaggagtctctgtaattgttactctgagggtatcttgggttatttccaaatcatctgaaggtatttgtaacatttccttcttaaaatatctaactgtattttcctaggacaatttggtcattactaaagtatccaggggtattttggtcttttagtgcttcagggacaatttggtcattgtctaaggacattttggtaatttttcctagtaaatatcttgctaaaatatctagggatacattggccatttccagaattgttcaggacaaatttgtcatttttgccttagggatatagacgtcatttctgaaattgttcaggggcgttcttgttattttgccctaaattttctactgcctttcattaacattttattctaagtatttgtctgtaatgtcttaaattttggggtgttacaaaaatcgtcttgagctttcattagtgaattttctgagtcactaaacactcttaggcttcacaaattcatatgattgtttgattcaagagagtgaagcatcattgttcatcaaagcataaggaaaggaatgcattgagtcagtaatctgtcattcaatccgttgaatcattcatgtgcatgaattcttggattatcaggtgatatctttctttattctttgaaggtgtaaaactgttattttgaatttctgcaaagattagtctattgtaaatgaatttcttgcaaggttagagatagtgtttctctaaggacagttgggtagtgttctcagtgtgggttttggtctctaaagggtctaatagtgttttatacttatgaactttatctagggttgataaagagaggcttgtaattgcttgtaagaatatttttgcaatagtgaaactctactctagtgttaagtggaagaactggatgtagcttcatagtgtttgaagtgaaccagtataaaaatttgtggctaatctttcttctcattcattcatctcataattgctttgtttgtgaatcattctcatagcacagaaagttatactctgttttctattcttcttgaaaaaggaatttgattgaatattgattcttggttttgaaataattttttatagtgataaagatcctgtgaaaaactctgatttgaaattttgatttaccaaggtccaaccaattcaccccccctcttggttgatttgaagtattctattcattttcaatgttgataaaaccttgttcatcaaaaggcataagagtgatatcttattggttaaagtatatgttgatgatataatctttggttcaactaaccatttgttgtgcaaggaattttctgcagctatgcaaaaagaatatgaaatgtcaatgatgggagaattaacattctttattggacttcaagtgaagcaaatgaagaatggaatttttctcaaccaatccaagtatttccttgaagtaatccaaaagtttgaaatggagaaatgtaaacatgctgcaactcaaatgggaatatcaacctatcttgtttcagatgaaaatggaaaaagggttaatgagtcaaaattcagaggaatgattggatcattattatatttgacagctagtagaccagacataatgctaagtgtgtatatcaagcaaatcccaaagagtctcacctaacagcagtcaaaagaatcatcaaatatctcaatgctacaccaaaagttggtctttggtatcctaaaggtgcttcaattaatattattggttattctgattctgactttgcaggatgtaagttagatagaaaaagcactagtggaacttgtcatctacttggaagttcattgatctcatggcattgcaagaaacaatcttgtgttgctttgtcaactgctgaagctgaatatatctcagctggaagttgttttgcacaaagtctatggttgaagcaacaattacaagatcttggagttgaattgaaagaaatacctttggtatgtgacaacacaagtgctatcaacatttcaaagaatccaataatgcactcaaggaccaaacacattgagataaggcatcattttctaagagaccatgttcaaaaaggtaatatcaaaattgatttcattgacactaataatcaattggctgatattttcactaaaccactggctagagatagattctatgctcttagaaacatgctaggtatcttggatgaatccaatctttgctagcttgtttagtatatgccttttcatatgcaattgtttatcctttgtatccatcatcaaaaagctgctacatttcgggtttgttatgcataatcttgataaatttgcaaaattctctgtaataatcaattaagcattggattaatcgattaaattcacttaaatcatcattttgtatgaaaattgagcttatgtaattgattacactaccaaaataatcgattattcctcctttatgaaaattgtctcttttgtgataatcgattactcatctgattaatcgattacattgacaaaaatctgttttccaatgtaaaaaaaaaatcactggaataatcgattacagtgaatgataatcgattaaaatactgagaattaattttctcaaaattgaaaaccttctggaataatcaattacatgttggattaattgattacacaagcttctatatgtttctgaaattcaaacttctctgtgataatcgattaaagcataaaataatcaattacacattgtcttctacctctgaatgcttgtaaaataatcgattacgttatgaattaatcgattactatgtgtgttattagtgtttctgcttgtggaataatcgattacacaagtgaaataatcgattatttatggagttactgcaaaatctgacagattttcttgaaagttgtaactgcccaactcccacctaattcaaatttaaatcctttgcagtgagttaattcgttctaacggctccttaattcaaaattcaaattcttggaccctaaaaatctttataaatagaacctttggtctaaggcaaaatcacacctaatctctaccttctcttgctaaacctctgtgttttgttttattctatgtgcttagaatctcggtctaggatgtctacctccaagagaaccaaaacctctaagagaaaggctggtgaaacttctaacccccctccttccaataggttagatctttggttcaccatagaaaaagaccgtatgacctatatccagtttaatgccacaaaactagtttattcccataaatatttagagcttgattggttcattagggaaggctttcaatttccttcctttttagaaacccagggcttaagaaagtttgtggagttaaagggtaatttttaccctgaattggttaaggtgttttacacctgtgctaagggatccatgtatgggatactgaggtcccaagtaaatggagtgcccatggaaatcacccatgaggtgtgggaggcagtagctggtatctcctttgaaagagaaagaaaatttgatgaaaatcctaagggttataatagggtagatacatatagggagatgcttaatgatccccaaatgagattaaaaactaggctaggtactggacccatgacccatgaggatagacttctgcactacataattacatatatcctcacacctagagccacaaaccaggcccgagcaatagatgaagacctacaactagtgtatggtccgaagaattcaattcagatgaattggattctcattcttgaggagatcatattgaaatccaaaaggctagtaaactacccattccctaatgttgtgcttgtgtctagatttatagactacttccaaatagatgtctcaaatgaagtagtgggtcacacaaactcaagcaacagtctcatcaaagacaagcatctcaacaagctaggaatgatcaagacaccacaaagatggcagatggttggccaacaagctgtgcttgaacctcctcctgctactgctagtgttggagtagatgctgaagaagatgaagaaagagattttgctcaacccctctacacccagttcgagtcactcatgctttagaaaatggatggcctaatctctatgcatcatgattttagggctgaaactagttcaactttagaagattttaaggctaggttagacaatattgaagctactgttatgtttgaagggtctgagacattttagcctttgtattttttttcttctgtttttatgttttcatgttttacttttaatttgaagagttgtaatggttccctcactcattaatatatccatttatgtttctcctgttcaatatccgctgtgctttacatgtttttgactttgataagccaaatagggggagaaatgattgatttggttcatgctctgcagtatactttattctactctatttttctgcacattttttgcccaaatcttactttgaatggattgtcaaattaagggggagctaagtgataaaaattaactaattaagtaagatataaatgtaaatgaattctggattaatcaacagatgctttaacacttgttcttggcaaagagattgaattattttcaggtttgcaaagctcaagttttcctaactttggttccatcaattaattttaagtccaacatttaatcaatcaagaatttggcatgttcaaagccaaaaaaggggagattgtggatatagggggagcatcacgaagatttaaaaggatttgattcaagattggttttgagctttcaacatgcttggatgccttgaagttgtttaattgtattatgtgtaagataaaggctaatctgatgatccatgcattgcattcactcattcattcataaacttaaatggttttcataaaaaataacaaagcttttatattttggttaaggttttaatctgattgaaaggtttttggaaaaatgctattttcactagtttaatcgattaccttactgatataatcgattattttgttcttcgttcaatttggaaaatcttttatgaacattgtaatcaattatccatcggaataatcgattatttgacctttgtttacaataaaactgcattgttaatgattttaatcgattacttaagtgttgtaatcgattacatagttaatcatggattttaagttctgctgggataatcgattaccattatccataatcgattacataggatatttgagaaaagtcacttccctgtcttaatcgattaccacagcttgtaatcgattacacaattcaatttgaaaatataagtcttctgctttaatcgattaccaaatcttgtgatcgattacatagtgcattttgttatcctgagacttctgtcttaatcgattacagctcgggataatcgattattttgctcattgttgaaacccagaaacattcttgaacagtttaatcgattacatgggtattttaatcgattacataagaattttaatcgattatcaggtgcatttaatcgattacagttagttacaaattctgttataaataggattgaaggcttgacttgttttctaactttgagagattgtacccattcgtatttctgagctcacataagtcttctaagcaattcctaagtgattttctcagtgtttttacttcttgcttcattcaaaacctcaatgggtctttgaatgattcttgagcaagaagattcttttcaagattaaggaaaagcatgttctgatttagtttgcttctcaaccttaattggtaattcatgtgcatatcattcattggatcatcaagttgtctctctccttaatctttgtgtgtaaatttggttctgaattcttgttgtatttgactattgtaaagtgggttcttcttgcttggttctagagaagggttctctaactcaagaacagagtagtgttctctagttcttgctccttagatttctaatagggttttggatttctattctttttctagtgttgataaaggggaggtttttgtaaaagcgtgtatgtacagaaatttataatagtggaactctaatctagtgttgattagaagaaactggatatagcttcagttgagaagtgaaccagtatcaattgcttgtgtctttgattctatttctctatctctcatcttattcattggtctttgattctttgattcatattcattgttcaacaagttctgttttgatctattgatttcttgggctgagacatttgattgagtaaaagatttcttgatacaatcctaaaaccaaggcaagtgaaggaagacttggaattacacatggaggtacttccttgggtgattaaagaaccaatggcaagggatagagctcaaacactccaagatcatatacaatctagcctaaatctcttggagaaccatgaagaaggctacaaaatgatgaatttatctgttgtaattgataacaagtagcctataaccgattaaatacacttgtataaatgtcagatttgtaaatagttctatgataatcgattacgagtcctatgtaatcgattacatggtcattagtagtgcagtttctgaactcagctcgaaggtaatcgattattccgttgtgtaatcgattacatggaagagtgagttcctgtgagttcttgtgataatcgattattctagcttgtaatcgattacctagttttgggagctcctgtgataatcgattatttggtgagataatcgattattttgttcatgagtcagtttccagactgatatgagcaatgtaatccattaccaagagttactaatcgattatttacttcaaaataatcgattaccattcaaaataattgattaaaatcgttttggctacagaggcgctatttggtgagataatcgattattttgttcatgagtcagtttccagactgatatgagcaatgtaatccattaccaagagttactaatcgattatttacttcaaaataatcgattaccattcaaaataattgattaaaaccgttttggctatagaggcgctatttttagtttttaaacagctgtttggatagcttcccttggaagctacatttgtatttcatttaggacgcatttacatttcattagcttatagtttcgtgacctatataagctacatttcaatagattgtagtaactttttggttaaatgaaattagaatgcactttgtgtgtgagaggttgagagttattctccctttttcttagtgaagaacttcttgtttcttatcaatagcttatgagctattgtggtgattcttgcaagacttattggaattcctattccatggtgtcaatccaaatccacttctaatcttcttccattgttccatttctcaaatcacaaaaacctaaaagctgtccaaaatagagcacttcatactctgtttttctgtccattgaagaattgatttcattgcaaggaagatcagggcaaataggacttgattcaatttaggagtccatcatttggtattagagcttaaaccttgtggaattcttcttcaatttcagtcttgagattcttcaaaggtaaaattatgcattagagtcaaaaacgaaaatcattagtaatttcttgtttcttgatgttttcttgtgattctttgtgctgtagttttgttaagtattgcgttacaaaaaccctaggttttcttgaagtttccttgtgaattcaggttcttcatgtttgtcatgttcttcatgtgttcttcatagttttcctaatttctagctttgattcttgtcaatttgtgttagtattgttgttgtgctgtgtaatactttgttttgatttcaatttcgtgcttaatctaaagcaagtgttagaaacaaaaagaaaaacaaaaacaaagagaaattgcatcaagtgttattagaaagcaaaagaaatagtgaaaagtagctggaaaacagaaaactagaagcaagctacaaaattacaagttttcaaaattgctggaacaacaaaaacaactaaaagtgtatgacattcagaattgatgaaatgtttttcaacaattgaattagtggcatatcttattgtgaagtttgttaaatctgaagtattcctggagttgtctcataaattcaaatttgagtagtcctttctaaattgtactttgttgcttgtctctttaaaattccaaaagttttgtcttagaagttttcttttctttggactcttaagccttgtctagaatcatttcatatttcactatagcaaagaggtttgattggacttgaagtttttgcctaagaactaaagagagaataagagtggaaaaaggcaagagagaatattatagaaaaaagccttggaagtgtgcaaacacgagagtgagagtaaacacttagagagtggtgaggaatttcttatatatacttgtgttttgctaacaatttctgtgaaggataagttcaagtggaggagatgtcttgtcacctaaaacttctaggttgatgagagccatgactaagaaaatggagaaattgcaaactagaatggatgcaaaatttgaagagttgcaaaaggagaaaacaagaaagagtagttccatgggtagtgtggatggattgggtgatggtagtagaagggggagtgattttgcttcttcttggctcgcctgagcaagatgacccaatttttgaaatttcactgcttctgtgaaaaattaatatatcgcgcttcaaatgttatttcaccaatcccaacggtcaaaatttacatatgtgggtgaggaacctacctttaaaatttgaagcgatccaacggttaaccaatccagaattaggattttaccaaaacaggttttgggtcaaactcgaaatcactcattttcaatgcaactcaaacaaactccatataacttaacatccacaccaagcaattgaaaataaggataattcataaaacatttcaaataatcctaattaatcaaataatacaagaaatacatcaagcatatatgttcagttatcgaaatttagggcgttacaaggagaagcaaacttcaaaggatagatggggaggacttgcctataacacttcagatgaccagcaagatatcactagagggaagggaatggtggacactctcttccaagctcccgtggaaagtggcactcactatgctatcatgagttcccatggttatatcagtgtcggacttcgctagtaagttgttgttggtttaaattcgaacttaatttagccaataaaactttgaagctcaagttttgattgtttaattttttgcattgtgtgaacttgttgaatgttaatgtgacttattttacaagtataatttagacaacaccatggatggcttctatattgctcctgtatttatggacaagattgttgtttacatcaccaagaactttttgaacttgccaaatattaaggtccctcttattttgggtattttgggaggcaaaggtcaggggaaatcatttcaatgtgagcttgtctttgccaagatgggaatcaagtaagtttaattccattgcaatgtgtattttcccccatttggaaaacttaaaagaaaaaagattccaaattttgtttaggctaaggtgtatccaagatcaaattgatactcaattgctaatgtgttcagtttatggtttacaaaccatggttttccctaatcaaaaggatttttttttcacttttacttaatctatgatttggaacccaaaatcatgctcaaatacaacacaactgtgattttgttgaacacattatttatggataaaactgaatttactctctccacaccatggtttaccaaaggagtctaactcagttgattgagtagggtgcgtgagtactgtaaaccctttggtaccacatttgattcttacggggataaaaaaaaaaccgtggtttggtatatactgaccaatccaaaattgcatttattctttggtctattgcttttgaatttagccccatagtgatgagtgtcggagaattggaaagcggaaatgctggagaacctacaaagttgataaggcaaaggtatcgtgaggcgacaaacattattagaaaaggaaagatgcgttgtctcttcatcaatgatcttgatgcaggagctggtaggcttggtggaaccactcaatacacactcaacaaccagattgtcaatgcaaccctcatgaacattgctgacaacccaaccaaagtccaacttcttggcatgtacaacaaggaggagaatcccatgttcccatcatagtcactggcaatgacttctcaacattgtatgatcctctcattcgtgatggacgtatggggaagttctattgggcacctactagggatgacatgattggtgcctgccaaggcatttttagaactgatggtgttccaaaggaggatattatcaagcttgttgacaccttctctagacaatccattggtaagacatacctcaattcaagtttcaagccaaaatctatacacaaatattttttttaatccttgaaaatgaggcttattttttgtttcagttcctattgaagttctactcgattttagtccctacatttaacaaaacatattgtgtttttagtccctaaacaaataaagtttaaatagggactaattttgaagaatgttatatttctagggatcagaaacatatttaaacaaaaatatgtgatttgctaattacttatcttcatttaccatataattttgaggcattgttataaaattgtatggataaaatgtgaataataaattgtttgatgcattttttgtgtagacttctttggtgtcttgagggccagagtctatgatgatgaagtcaggaagtggatttctggtgttggggtagagaatattgggaaaaagctcgtgaactaaaaggagggacctctaacatttcagtaaccaaagatgactcttagcaagctccttgagtatggaaacatgcttgtccaaaagcaagagaatgtgaagagggttcaattggttgacaaatatctcaatgaggttgcacttggagatgcaaataatgatgtcatcaagactggaaacttctatggttagacctttgatcttaatgcccttgatgggaaaaggaaaaccgcttttgacttcaagattatggtggaataatcattcaggatggacaagactaaataaaggttgccttaactttaattgtttggttgcaagataaggagctcaacatgttcatgttcctgtccctgaaggttgcactgaccaccctactgcagaaaactatgatccaacagccagaagtcatgatggaagttgcacatacaaattttagagttttgaaactgcaaaataaaagaatgttactatgttttccacattagaattcacttttttatgtaagatgtagattgtgttattgccggtgtaaccatttgttgggttttacaggtgacgatgtgacatcttatagctagcatagttgaaaatatcatttcctttatgttttactgttcatcttaccatattggtcgaatgaatagtactaatattgtgtcgacaaggagtaagaatttgcctctccatacttcatatgaagatatttacaataactcatatattactcataactgagctacaccttcttgattatggattagaccaaatccgacaaaaaaaaaaaattaaaaattaaaatcatgaaacatgtatagtactggatgagaaacatattcaagtcttcttttaaaacctggacctaacctaaccgaagacttattccttcatcaatcaactttattacttaattgatctaaacttaattattatataatgacagaaaataatactcaatcaaatgctacaggagatttatctgcattcttgaacttaacagcaaatcctcctacttcagatagaactagacgtctattttgttcaccatcaacatttaccccaatatcttcacaagatgtggtgttggcatcagcacagaaaacaagcttgtaatcaaaattatcctccttaatttggaactttcccgtcttaatttgatgactagggtaatcagctacattgccaatgcccacataccacaccttgacaaattcatccataacaagcatccaacaagtgcacgaattattgtagtcaggaacattggtgaattcaatgcttaccatttcatcagtgaagatgatcattgtttctttagttttaattgatgctggcaagccaagatagttccttgaggaagattgaacaactgcaagagggtgtgtcacaccaatgctagcaagtgtaactccaccaccctcttcatcaaaactaggtaagatgaagtagtcacctccattttctaacatgtgatcatctgtgtcatgaacaccactagcaacggcaggcttcatggtaaatgcaattagaaggaacaagaggccaaagaatgaattaattgtcttcattgttatacttgttcaagtatatgtaaattagtttcatacaatggtgaaaagtataacttaattgatccatttatacatggctaagtgaataagtaatcaagtatatgttgtggataagttatagcgagtagcccgtgtagaaagattattaattattagtatatatttatgtatgcacgttttcatcattttgacaatggcgcaataaacgagtccgttatattatgattttatattagcagcatcagcatgcatgatataatcgcagtactagatttgacaatgaatattggtagttggtagatcacttaaaacgtgttgatgcatggatgctttgaaatgccaatgggtaacgtcgacgtgtatgatcgtatcattggcgttatctctattagctattaccaataatatttaaaacaataccgtttaccaaatactttttcatgttttagagggatttttttattctctcacacacatatgggatttactacttcttttttttttttttccttgggtcagtctctcccttaattcatagactaattttgtttcgtgtatataattattattggtcaaataaaattttacacacataaaaaaataaatatgaatgatcttattaaatagatcattttttcacatatgaaatcaatagagttttatatcattgtatcgactatttgaatttttactaatattatataaaaggagggatgatcttgcctttaaaaaaattgtttagagacaaaaatttgtaaaaatttaatagactaaaaacttaattaactctattttttattaatataatactatatctttttatatgtggaaatgaaagacagaaaataaagaatttacaacaataacaacttatttatctattcaatcaattaagttatatctctttcacataattattactaatcttacacattatattttatatctctttctatatatttatatttcatatctctatgtagatcaattattttttcactgcaagtatgtttccatcttatcctatatatcattatttttttttatattagtctcttctcaatgtgaatagtagaattgttcacactactatatatatagcctttaacgacacactttcaactacggtatcaggaaaatcgtcattgttgagaacgtggtggcaaaaccataaatatcttgaacttggaaacgacggttttctataaaaaccgtatttgattgaagaaaatgatgacggttataaaataaccgtcttagtatttgttaattcaaatacggttttttaaaaactgtagttgtcttcattaatttcatattaggtttttggattgaagatatttgattcgtccacaatttataacctaaatttcgcgtgtttggcacccttctgtctgtttcgatgtaaagaagagtgttgaagcttttcttcttcctctgttgtcttcttccctttgccttcaacctcgttttcttttcttcatcttctatcaccgattctaattctcttcttcctttattattgatcctctctgcgattatgatttttctcatttcctccgttttctcggcgaccgaacggaggaggatgaggaggagaacgcagttctgaaaacaattggaaaatgctgggaactgcactgcaattcggtggcgttcgcgacgaggattggtttacattctggtgaaggcgcagaagagccaaaatcagcgcaaacagagtcacagagccaagaacaacgagcctgaaaacgcggatttagcttcgaagagcaaaatcgatgtctctgaggataataacagcaatagtgataacaatctcaaccaatctctgaaaccaactttttctccgtccgtagagtctgtcaaagtgcctttggtgcttgatcaaagtgattttgttgttcagtgttatgtttcgtatttgtcagctattcaactctatgctcactctactaagaattcaagtgcaaagccaaggtattaccatttcatgtgcttaataagaattttggtaactttaagacaatactaaccactggaaacatggtagaattgtcgatggatgtagctcttttagtctcgctaacaactaacaactaacatttgccgataaaaaaaatgtgtgtaatcaattgatataccaggtgttaaacttttcactcttacagcggctaaggggacgtttggtttgagaaaatgttttctattttaatttcttattttcactttcaaagttttaagatttagaaaatttgtttggttttaactttctgtttttctattttcagaaaatgaaaatttgaaaatgtattcagttttactatttttgttttaagtttgtgatttggctctaaaaatttgcagaagctttctataacaattccttcaacaaatttgttgcttcctgagtattgtatggttcacgtggctgaattaaatcaagagtaagactgatcttgcctccaagatgtcagatggcctcttccatatggagtgtaaatgatgagtgtgcatatccaagaagaaaattaatggtgattgatgtgttgcaaacacatcttatttttagaatagttttagcttatattttgattaaataaataggaattagtttagttttagttagtttattaataatattctattttatctcattccaataccaattatgcattttcaggacaaaagaggagaataaaggccagagaaagaagaaaacaaattctggagtatcacgcgagtcgcgccaacatccacgcgggccacttggaagaccagagaagatcacgcgggtagcgccgttactcaagtgggtcgcgtgggaacttcaagatttaagcatttcaacgctgcaattccacgcgacatacttggagtatcacgcgggtcgcgtgaagactcaaagaaataaggaattctcttctgttactccacgcgaggcacttcacatttcacgcgacacgcgtcattcctttctgccagtccacgcgactcgcgtggtatcgcgcgcgggtcgcgtgaggttgaaacagtttccttatttaaatcatatatttcaagatttggtattatattaggattagttgccttaattaagtgattctataaatatatttagattccttaattaagaagatttgatttagatttggaacagaaaataggccttgttaccttaattaaatctatctataaataaaggcctctggggggggttcaaaacatctcttaccatcccactattaccatctaccactcttatcatccattccactctctcctcatattttcaccattggaagtcaagaatcaaggcaaggtcaatcaagaatgtcttatgtgatagcttttggtgtcttgaagcctatggcaggctgaacttgtattgtgggaaggccatgaactgatgtaactcctctgtaacttgaattggtattggttttaatgctgttttgattattttattctactctgtgctattcaatgttttattcttatttggaattggccattctatttaagtattgagggttaggattcgcaatggacacgttggggttctaatttctgacatgtttagaataatagttgctcttcgcctagacatagggatgcgtggctacggattttataatatgttctttgtatgcttaagttgatagatttcaccaagacattgggttttcgattcaggttaaagggttaattcactaaggaattagggattaaataacttaggaaaggcttattctccgaataatcttaacaagatcgcatgagacagattctttgaatacttagtttgacagattcactaagggtttaggtttctcgatcgaactaacgggttaaaccgctggttatgactctagtagttctaggatttacgaatttaggaaagatttatcaagtgtgtgacctaagataataaaccaatcaagtgaaggaggtagagacaaaagggattgtgcctgaccacaattgtttcttccattggtaacttctttataattttattgcatttaaattctgtttctataatcaaccacaactcaacaactacttctttattcttatttttctgttttaattccaatcatttagaattaatattattgtgaaaattaccccaatccctgtggagacgataactctacttacctacttttattacttgttaacgatcggtgcacttgccgtatatatattcacataaatcgcacaacagtgatccaacatttattcagttgctttcataactttcttttgattctgaatcaaaatcaacttagccaagaagggaagctaaaaaatcacttgagtgagacagaggatagtggaatttcgtgtgtaggggtgaaatccgcagatctacgaagctgttcatccctgttgataatgcttatatctccccacgattaagcctcttcagcccatttgcgtatagggtatattggttaaatggattttatgtggtattgaatatgctttctgtgttctggttgaaaggcaaccggaaaaggttgagaagtcaatgaattagaaatacaagtgtggtttttagtctttgcaaaatgcttttcatagatatagaaactgcaggagttcaaaatggtggaaaccagaaagatgatattgttatctgtattaatagaaaattagctggttttgactctattttcagtgaaaatttctttaccctcaagaggaatgtcaatagccactattccttttaatagaagttgttgtttgggattttgcaaagaaaatgtttaaatctattagtttataaccatttgattttattgaggatgatccttgatacaatgataatgttgcattgcccttttataaattatagtcatttcaatttgttcagttttgtaattgtttcctaaatttcacttctaatgaattttggaacaaatttaagcaccaatttgatcttccctcttttcccttctagtaaagagtaatgagtaacatttttttcattactctagattttccttgagggtttagtgtatggaaaatggttatcaaactttatattgaaggcataaaatcatttagttttaggaatttacttataaaaaaaacatataattctacttaaaaccacttttgaggggaagtgtatgaaatggtgctttaaagcactaattttgtttaagttacactttcacgaagtgatgtcatcatgcttttacttttagaatttagactattttgttagaatttggacaaaattgccaaggtagtggcctttgtgcatgtagcaatttgtttaatagccaccgatcctgcacatttatatatgcaaattttcaagttatcattcatgaggaccatcttttgcttacattttatgtgcttctagtgtttttttcacttcttttgagtgaattatttgatgtccaagttgttaacgaaaggcacggttttgtttgtaagtggagtcatatatatttgcagcagttttgttgggttataagttataacgtgttaagtggcactaatcattaattgatgagttaacatgttaatgagttaacatgagtcacaaaagatttttttgtaattggtatgcagaaattgtgcagtatctcatgttttgatttgtattttaattgtttagacatgattggttgaaaaaaacaggctgtcagctgcaagagagaaaaaaatgttgagggtgtaaggtaattggaaacacaatatttgagactatggggagtcctcttatttatgatatggtgtttatctgatcgatatttgatgtgattccttgtattgcctcagggatctcttttgtattgagcttggtagacgtgaaaacaggataaatagaactagaagagtgtggatgagtgatatatctagaagtgtgatttgtctgatatctaatcaaatctcacttccttctcttcattccttccatttttcaccctaaccaagcacacttcaaaattaaaaaatgtaaatttatttttttcaatttgattcttgtataatatcaattggctttgacttttgatggattaacttttcattttgatctcaatatattggtttgcattttggatttggttataactccagaaaatgttgaattggacacaaggaaattatatttctttattgattatttttttaaaaaaatatctaatatgactagggatcccatatgagtacaaaacagtggatctttcaaaaggagagcattacagtctaggtgaattcagagttctaaaatatatgtagtagtttacgttccaaagtaaataatagtggtttgtgaagtttgtttgactaaaaaagcattcatttatgcttaaatttcagacttcaagagattgaatcctctgtactatgttctagtggattctcagcttagagccctcaatcttcaggtaaaattcaagacgattgatttggatttgcatcatgaatgtgttgaatcaagatttttttttaacttttaattctactagtttggtatcttcaaaagcaattcattgggaaaaagccaatcttgttatgaattctaatagttaaatattataaaggtttccaaatatcttataagttcttcaggatgcaagatatactatgaggtatcttataatatcttatatttatagttaattggcttactttctcgatttctaactattgtgtatatatggtgtatgtttctttgttcaattttctgttttagtccctttgattcctataatcccttcatatattctatgagaagtgaactttatctgaacaacatgtatattatttgttgttcatccccttcagggattagtcaaatgatatgtttggaaccttatgctgctaagagaaaactgaaatcagaaagtgacatggtggggacttaccaaattgcattggttactaagagtatagacatgcctgcttatgtggctgctaaaagctacaaggtaggcttgctactcactgaaattaatgtggtgtgaagttgttgcttaagaatgcttgcatatttatttaattattatgttaatcaatgagaatttaattagaatatattgtttttaacagccactgtcatgacttaagcacaagaggagattagtctattaaatgggagagcctcatgccttgattagaacatactatttttttttcatttttttgcctttgagattgcagtttattcttcaatggttgactgggatacttgtgattatttgcggttttgaggaagcagttttctgtggatatctcctccaacttgcgaaccagtttctctatggttcactttgttcttgtggtggtgagcattatgcttcccctgcttcttattcacgtgtgcatattatgtgattactatatttccttaataatgactagttttttattgttatgaaaaatcaacttattttttctattttggtgtgcagctattcttatattcacgtgtgaaaattttcaatctatctacaccattctggctatgattgctaccttaccggttgtcaacttttcttctttcttttgttaccaatgcatataaaaatgctctaaccatacatttttggtgagaatgaaatgcatttgattctcttttgctatgatggttggttgcaagtttgtgcctcctcttatatgtaatagctagtttctgagacaagaaaaaaaaataaaaagagaacatggactttttaagtatggttgtgacttgtgactgatcttgttttattattcaatgcatggttactttgttttattgaagctctataacttgagacaattaatatcttttatctgtataattatttgctaatgatccataaaatgttgctttatttcctataatctaatagacaaactggagaagtagttccatctgatttgtgggcttggagaaaatatggtcagaaacccattaaaggttcaccttatcccaggttagcttcttgttagtttagccttagccttaggtatatatcaaggatatattattcattgtaacataatatattttactaataatatataactatgggcataatatataactacaccaaatatatatatatatattcaacttctctttctctaaagtcaatttattgtaaaatacttgcactatttcataggctctagtgacatgatgatgtaggcttattgtgattattgaatttacacccccttccccttccctcattgtgatttatattcataactgtgctgacaaaatatggacacatgtcttgaataccaagttactttttcttttgttttctgaaataccatcttttactagccagagagtgatggtaagttcgtacaaatgcttgttggtttgttgcaagtttgacttgacttgtttgctttctctctctttatgtcacttttgtgcttgttcaatcatgtgtctagatagatattatccatgtcccggataagataagtgtaacaccccgtgtgcatccggcgtattaacattatacaatatcagagtaacgcagcaagcatggtaaagaatagtaaaggaagcataaatccaacataacatacatactttatacatatatggtgaattactgtcatatacatgtcaattttctcaagactatacaaatgacccctcagggtatcaaaatacaaccaaaataatcaaaatgggagctaacaagctccagtcatctagacctagggttgtcttcacactatcccagctcaggcctcttgccttgggatttctcagacacttttgtctctgttcctgcacataagccccaaaacaggggtgagataatcatctcagtaaactcagggttctcagaggtttccctccccctggttcactttccagcatatcatagcaaatatgtacatcatacaataaaagggaaatcacatcaagtcacaacctcaatataacatatacagcaacacatagtgcttgagagagatcatccacctctgtgagtacattccctcagaactttcctctaagcacctgaataggatcatccaccactgtgggtacatctactcaagacttaccgcccaatacctgaataggatcatccaccacgtgtgggtacgtctattcaggatttacatgaacgcctatgaattatcctatgggagatcatccacctcaatgggtacgttcccaaagggtccatagttccttagtctactgaccagcagattatatacaatcacacatcataattatctaataacatagtccatgcaataatacactacactagtttaatcagcatcatcataataagcaatataacttacactatctcaaaatgatcaaatcacaccctatatcagggtcgagctagcactcaattgctagaaatcattaaaccatctcattagtattcactacattttcaacatcataacatcatataacattagattacagccatatcaaacaatcacccatgttgggtgcagtgaaacacaagcagggaaatgatccctgaaaacactgagcttacctggtcgtagctcagaagtagctcccctagtctcttggtgatctctacccgcagtgtgcacgtcacgccctacagtaggcatgaatcaaacaatcagaaatggtattcaaccgtttatatggaaggaaacaccttcccattcataactaatttataatcctctaacttaaggtttatcttagcccagcttctactaggccatacattgaccctcaatggtctgccttagtcttaccaaggcatcagagttcctttagaactctgtacagctcaattcaaaactgtaccagaatcaagaacccacattggttcaactcagccaaaacacatatataatcacgttttcaccgattatttggccttatgaataacttttgtaaaggtacttaagttatttcaagctataacattgcttattcacatacacttctcccttccaagagccaaactccaacttcatcacaatttcagtttcaacatgccatatggctcagaacaacctcctggctacatctctctaaagaacctaagcctaattccagccctatcaacatatggttactattcatccaatccccatttcatagattaatcggttaaaacttgagtttcttaccttaattcagtcgaggaatgctggagaagtccttctcctagctctggtgtccttaaaccagcctttttcccttcccaaagctcagtcctctgaagaaactcaaggaatggggttcactcaatggttaggctgaaatttggcttccaatcaaggttataggtgattaggaggtgttttcctcaagttaggtgtttagaggaaggtgtttgggtcaattatggtgaaggtttggagcttggagctccaaaaatggcagaaatgcggtggaggaagaagaaatcatgattttgggaccaaaattcgtaaaatggcccttaaatactggtcctgccgacgttctagcgctaatcgcgccatatatggcgctattcgcgccaaattgacgcaacagaaggcttcctgggcatttatggagctaatcgcgccattacggtgctaaccgcgccatttggcctcgtatgtggcgctaatcgcaccaaactgacgctattcgcgccatcaggccgcaagaaatagccttctggtgcaatttcacgctactggcgccacttcctatgctactggcgctgttcccacgctgttagcatgagattttttattttttatttttggaaaactaggttattatattctccccaccttttaagaattttgtccacaaaattcaaagacatacctgtcaagcaactcggggtatagctgcatcagctcctgttctcgctcccaagtcgcctcctcgggtgtcctcccttcccattgtaccttgactatgggaatggtcttgctccggatcttcttctccattcgatccaagatccgcacaggtcttgtaggacttgtcaaattctctctaatctgaacagtgtcaggttccacttcgtgtgaggaatccggtacatacttccttagctgtgacacgtgaaatacatcatgtaatcctgacaactggggaggtaaagctagcctatatgccactggtccgaccctctaaagtatctgatagggaccaatgaatctagggctcagcttcctcacacccaaagctcgtcctacacctgtgaccggagacaacctcaaaaacacatggtcgccctcctcaaactgcagcggcctgtgtttatgatcataataactcttctgcctactctgagccttcatcaacttgtctcggatcattctgatctgctcagaggtctcctgaaccatctcaggtccaagaagctgtctctcacccacctcagtccaacatacaggagttctgcacctccggccatacagtgcctcatagggtgccatgcccaggctggtatgaaaactattattatatgagaactccaccagaggtaggtacctgtcccagctggcaccctgctccagtgcacaatccctcagcatatcctccaaggtctggatggtcctctctgtctgaccatctgtctgaggatgataggatgtactgagcctcagctgagtaccaaaagcttcctgaagcgcactccagaatcttgaagtgaacttcgggtctctatcactaatgatactctctggaactccatgcagtctgactatctcacggacatatagttgagccaatctttctgcagtatagttagtcttcacaggcaagaaatgagcagacttagtcagcctatctacaatgacccaaatggaatcacatccagtctgagtcctcggtaatcccatcacaaagtccatggaaatgctatcccatttccactctgggatctgtaacgcctgtagtaggcctgacggtctctgatgctcaatctttaccttctaacataccagacatctagtcacatactcagctatatctttcttcatccctggccaccaaaacttcttcttcaagtcctgatacatcttggtagcacctggatgaatactgaactggcttttatgggcctctgtcagaactgcctcaattagttcgcctttaggcactacgatccgaccctgatataacaccagatcatgatcatccctggagacatcctgctgaccaatcagggtcttcacattatcatcatgtctctgggcctcccggatcctctgaatcaactcattctcgatctgggtccttctcagctccagaccctcagcaccctctatcacggacaggtgcatatctctgaattgctcaatcagtctgcaatcagagattatcagacaggcaacactgacatgtttcctgctcaaagcatcagccaccacattagctttccctggatggtatttcaactcaaagtcataatccttgaggaactccatccatcttctttgtctcatgttcaactctttctgatcaaacagatacttgaggctcttatggtcaatgaacaccaccaatcttgcaccatataaatagtgcctccacactttcagagcgaacacaatcgctgccaaattccagatcatgtgtgggataattctcctcatgtggtttcaactacctggatggataggcaaccactctcttttcctgcatcaacacacatccaagtccctgcttggaagcatcacaatacacctcaaaactaccctcaggatcaggaagaatcaagactgaggctgtggtcaacttttccttcaatctcaggaaacattcttcacattcatgggtccaaacaaatgggttacctttcctagtcagacgagtcagaggtaacaccatctgtgagaatccctgaatgaaccttcgatagtaatctgccaatccaaggaaactacggacctctgaaacattcttgggcctctcccacgatatcacagcctctgtggtcaacttttccttcaatctcaggaaacattcttcacattcatgggtccaaacaaatgggttacctttcctagtcagacgagtcagaggtaacaccatctgtgagaatccctgaatgaaccttcgatagtaatctgccaatccaaggaaactacggacctctaaaacattcttgggcctctcccacgatatcacagcctcaattttgctaggatcaactgctacaccagctgcagaaatcatatggcccagaaatttcacctctgaaagccaaaactcgtacttagataacttagcatacaattggttatctcgtaagatctgtagaacaatcctgaggtgttcggcatgctccgcctctgtcttggaatagatcagtatatcatcaataaataccaccacgaattgatctagaaatggtctgaataccctgttcatataatccatgaacactgcagggacatttgtcagaccaaatggaatgacctgatattcataatgaccataccttgacctgaatgcagtcttcggtatgtcctctagcttaatctggatctggtgatacccggatctcaggtcgatcttggagaacacacaagctccccttagctgatctaacaaatcatcaatgcgaggcagagggtacttattctttatagtcaccttattcaactgcctgtagtcaacacacaaccgcatacttccatctttctttttcacaaacagaactggtgcgccccatggtgacacactgggtctgataaaacccttggacaacaggtcctccaactgtaccttcaattcctttaactctaatggagacatgcggtaaggggctatggatataggtcccacaccaggaacgagatcaatggagaactcaattcccctatccggtggaagctgtgtaatctcctcagggaacacatcgacaaactcacttaccaccggaatctttgacatatccaacccctgattcctaactgttgcagtcagcaaaagatagccctgagcccctctctgtatttccctgcagacttgcagaactaacaaaaatgaagtaggacttgggctaactccatctgaaggtaccaccaccttcttatgacaacaatccaacataataccgtacttcgctaaccaatccatacccaagatgacctcaatggtagacatcgccaaacaatgcagatcaactatatattctctgccctcaaactggaaatggacatctttacaacacatgtccaccctacactgctccttggaggcagtagtgacctccataggaagaggaagtctggacacaggaaagtccagtctatgtgtagtgtggtcactgataaaagaatgggtggctccagagtcaaacagaactctaacatcatgggcatctatcaaaatagtacctctgatcagatcaggagctctgacggcctctccagcatccactgtatacacccggcctgtagtaggagctgctgatatcactggggcaactgtagcctgactgcctacctgcgagcactctctggcatagtgaccaggctggccacatctataacatatcaattgtccgacgcggcacactcccagatgattcttcccacggttagagcacttgggaagtgtagcagatctcaggggtgctcttcttggatcagggcccttcttaaatctgcctgccgtggaagaaactcccaagtctctgccctttccctttccaatagggcctgccccactaggtctcctggtctcctgtttctcagtctgggtggaatggctcccactgcacctcctgatcatatcctttacctggcgacactgtctcaccaggctacccagatctctggatcctctccctgctatcttctcttcaatgttctctctaagtcctctctggaacttagcagccaaaacctctgcttcaggaaaagccctcctgaaatgtgcatacttagccaactcattgaacttggctaattactcatcaactgacgtcttcccttgtactaggccttcaaactcaacctgcttctgctccctggcgtctctgggaaagtaacggtccaagaattgggcctcaaacacctgccaggtgatgacctcaccctggcccctcagtaactctgaagtggtgacccaccactcatgtgcgtctccctaaagcagataagtggcatagagaagcttttgatggtctgagcactccatcactgcaaaaatcttctctagtgtctgtaaccacttagcaacagctatggggtcatactcctcgtggaaggagggaggatcatgcttccgaaaggcgatcagcatctttcccctggctgcggtgtcctcctctgtatcagcctgggacaacctgtcccctctctggtactaaggcccatcagagtgatggctacctctaccctggtggcgactgccctcgccctcaggtgtctgctgtgtaggggatactctatcttccctacgttgagctctcaactcagccatgagctcttcatttgtcttaagcaaggcttcattagcctgcctactagcagcaagctcctgctgcacagctgccaaagcagctaaaatagggtcgggttgttcctctgcacccgccctctcactggtattccgggtcctcaccatgatactgcacatataatataacaggaggagttgatcaggctcacacttaacatcatacatgcaataatcatggtatacacccagccacacagagaaaacacgccattcaccatatattgcttctttaatatggctctgataccataaaatgtaacaccccgtgtgcacccggcgtattaacattatacaatatcagagtaacgcagcaagcatggaaaagaatagtaaaggaagcataaatccaacataacatgcatactttatacatatatggtgaattactgtcatatactggccaattttctcaagactatacaaatgacccctcagggtatcaaaatacaaccaaaatagtcaaaatgggagctaacaagctccagtcatctagacctagggttgtcttcacactatcccagctcaggcctcttgccttgggatttctcagacactcctgtctctgttcctgcacataagccccaaaacaggggtgagataatcatctcagtaaactcagggttctcagaggtttccctccccctggttcactttccagcatatcatagcaaatatgtacatcatacaataaaagggaaatcacatcaaggaatggggttcactcaatggttaggcagaaatttggcttccaatcaaggttataggtgattaggaggttttttcctcaagttaggtatttagaggaaggtgtttgggtcaattatggtgaaggtttagagcttggagctccaaaaatggcaaaaatgcggtggaggaagaagaaaccatgattttgggaccaaaattcgtaaaatggcccttaaatactggtcctgccgacgttctgacgctaatcgcgccatatatggcgctattcgcgccaaattgacgcaacagaaggcttcctgggcatttatggcgctaatcgcgccattacggcgctaaccgcgccatttggccgtgtatgtggcgctaatcgcgccaaactgacgctattcgcgccatcaggccgcaagaaatagccttctggtgcaatttcacgctacgctactggtgccgttcccacgctgttagcatgagatttttttttttttttggaaaactaggttattataataagcaatgcataatttttcctaattactaattttagaagaaaaaatttccattactcgtgaaattgataagaataaaaaaatatttaacaaatatgtaagtcctttttgatgtgaacgtcaatggttttgtaggaagctgctatgtgatttttgagatttaagaattatagtatgaatttttttattggtaatgaaaatagagttaaagaaagtcatttttgaaaaaaaaaaaaaaaaagactgagctagttacttgtatatttgaatatatttttgtgtaaccttaacctctttttattgcgtccacatttatctcacttgtaaatgagttcatgggtgatatgtgtaggatgatgttacactcaccaaccattggctagtaaatgggaaacattacccacagaccaggttagaatcaactaaattggtcaatgatttatagcaaaattgttatacttggttataataataaaaatttaattagacatgttcaaatgttcaatttgaaatagactaattaaaagtatggtgcaaaatcaggattgaaccgacgattaaatgtaacttaattatacatttagaacttacacatacacacacacacacatatatatatatatatatatattcattatttagtataaattcttttacaattaaatgagctatcaaaatataaataaagcaattggaaaaagaaaatagtataaaaatatgttataacctagactaacttcaacacttgtctaaatcttttccatgtaccatcaaataaagtgtcatttcaacaattttctggccatgttactgtcaacaaggttattggtagagctcttttttactggctcactaaagctacccaaaatcctctcactaaacctttagtcatttggctcaatggaggttagaacttttgaccactcttatctgtgataaattattgtaacctccaaaatcattatgatctcaactaatctccacataatacataattaaatattttacttttcatgaattaaacttaacacgtgttacataaagattaattaaatatctgaatgtgttttggttgccaagctatgacaacggcattattcaacatcgtcattccgtacttatcataccccactcaacaaccaagttgtatttctattatttgttctataattacatttgtatcgaaggctccaggttttaactgtaaatttgttataggttgactacgttaattctatgagggctgctcgagagttcagttcaagagtttctgattctttgaaggtaatgtatcaatcaattctactttctagttcaagtatttttggctgttagatgcagaaggtagttctaattataaagagataaagtatgaagtagaagatttagctctaccacattttccatgtccaaattaacattctttttctcatgcagattgaaatttttccatattcagcgttttatatgttttttgagcaataccttcatatatggaagattgcactgatgtgaaacaaggctattataaaagaattaagcactctagtccctggttcgaaggacctttgtttccctgaatatagagatcatccggatgacccaccgatcaccacaatcaaatgaggtgatgatgccatttccatccattaattgcctcttagtatgtccacaaaagcatgtcagaagacactattttatacctacaacttttatagttatgaatccattagttttacttttcttttatgaatcaaaaaggccaatggatctttctcattgcaatcattggtggagtaaggcagttttacaactttcactaaaataaaaatgagtgaccaagacatgtgttccctttaatatgggatggcttatgtaaaagaacttattaacatgacccttacattgactcaatatcaagcaaatggtctttagtgtctttggtgatgttagattttgaattagtgattttgttgtgctataatacctacaagtctctagctagttaagtattgaaggctttgtatcaattcatcatgatttatttcataaaaccaaggaagaagtgtatctatccatatataaaaaaaaaagtctttgtaggttttaaaaaaataacaaataaaaaatatttaaatggaaacaaagacggtttttaagggaaaatcgtctttgtatgttgttatctcttaaaaatcgtcttcgtaggtgttaaaaaaaaattgaaatggaaacaaagacggttttaagggaaaaccatctttgtatgtcaacatacaaagacggttatcttttaaaaaccgtcttcgtaggtgtttaaaataaaagaaaaaaaattgaaatggaaacaaagacaatttttaaggaaaaactgtttttgtatgtcaatatacaaggacaattatctcttaaaacccgtcatcgtagatgttaaataaaaaaaaaagaaaaaaattgaaatggaaacaaagacgatttttaagagaaaacctgaaaatataatgaacatttatgcaaataaccaagaggggggtgaattggtttttcctcaaagtttttaaaattccctttcaaaaatgttacagcggaagactttcaagaaggatcatatctttaaaaacaattaagaaaacaattttttcttcaccttcaccaaccaaatctctcttgtgctgtgaccaatcttgtgatatgaacaaaactaatacttcaagaatattatgaacataaatagaaatattcaaacacacaagatttatactagttcacctctcaaccccgaaggctacatccagttttcttctaaccaaaccttggtcaaagttccactataacaaatataagttctttacaagcttacaatgatctcttttacccttcctaggtaaaattcaaaatctaaacctatagacttttcaaaagatcaagaactagagatcccctctctgttttaccctctagaaacccttctagaaaaagctttaaagattacaatttgttataagaatattcaacacaaatacaacacaaatatcaaacaaaaataaccaagcttatagttcaagaaagatatcacctcataacctcaataaattcaatgaaatgaatgatctaaccaaactgagaatagatgcaaataatctttcttgatgacttctttaaccagaaagcttgaacaatgataaacacgttgtcgatacgcaccaaaacaattttactaagttaattctgtagtacagagataacctaggtcgactcagagacacaatcaatatggttctagcttcaatttacgaataacagtgaggggggattttatcaaacagtttatgtgtgtaagtaaaacttgcaaaaacgtaaactaaaatcaaagaacaatgcagaaattaacaagattatcaacaagtgagtaaaatagattagagaagcatcaatccaattcaccaaaccaagcaatttgaatcatcatcattctcagaaatttatcctatcatgaacatccattcaatctcattagaagttgttcaatcgaattaacccctaatttaattgaaaccacaaccctaattgaaatatcatccaattattctgtgattagtattcgaaattaggcatgaatccataacctaattcgctttcaatcctaaatataacgactacatttcttgttcgtatttaatagatttcgcttattaattttacagaaaattatttttacgtaatttcgtttacgtaaaattaattatatgcaataatttatttttctaacacgttcgtaaaattgtcaaaatatacgattcaaatataatttaatacacagtccaattacaatacagtcccaaatagtctgttacaaaataagatgcaaacagctcaacatagtgtcaaatacagtcaaacagaaagtcacgaatacaacacatagaacatccaacaacacatagatcatccagctccttccttagtattttccttagcttagtgttcctctgctcgcccaaatagattggagtcatcacaggtgtcaaccacagacacaactcgggtgagtacatgataaatatgattagataattaacagaaacagaaatagataaataatcgaagtaaaataacaattataaaacagatgtatgatgaataatgaatgctttctttattaaatgatgcatgactgagatctcagagacctaatataaggtaccaaaatcaaaatagtttcacccactccagtgaaacagtcccacccactccagtgagacttccctccactccgaggggataaaaagggtaccaattgtaacaccctcctaatttactatatatgtgcattatctgataaatctgcattcctaaaataaatgacataaatacccttagatatttttgaaaatgaccaaatgtccttgaacaatttcacaaatgacagttaggtccctagggtaaaagactaaaatgcccctgaacatttacccaaatgaccaaaatatcctcatagctctgataaggtcatataaccttagtacggcccaggaaatctgatataatatagaatgatcttaaacaaagaattattgatattattagcaaagaaaaaccataagatagaatttttagaaattttaaaagtttatgtcaaaaagaattgaatacaaattaatctaagattcataaaaatacagagaaaggaaaagcgcactctaaagaattttctcttgattatagaagcaataagaatctttaataattggtttagatattttactacttaaaaacaaatggaccaataggaagttagaaactattagaagaaaaaataaagcaataacataatgaaatattactacaacctacactaagttctaattaaatttggaacttcattcttaaaaaatcaagatgaagtaagttatgaaaataagattagaataagtctatttaatttcaagacataaaatacaaaatcaaaatattaaattctttaaactttaattaagactacataaataagctttaggctatttaaaccaatttaattggaatccattggccttaaaaatactaagctggccgtgcacctccaaaatgagtgaagaaaactttagaacattgtggaacaaggccacttggatagctaggaagccaaggagcaaggtgattggaccaaatggaaagttgaaataaaaatcttccaaagaactaaagctattcacggattagagtaaaaatcaagggcaaggcactaagctagacaatcccacggatggagcaaagaaaagtgtagaaactccttgaactaggccacttggaagtaagaaccaataggaaggaagcaactaaaagctagcttaagatatttttcaacaaaaaagccaaggaaactagcaatataaaagaattggtggggaccaagtggggctgaaaaattctgcacggaccacacctccattcagccatccttttcatctaaaacacaaaagcaaaacaaagccacaataagggaagcttcacgtgaagaactaggaaggttgggactacttgctaaatttcaaacttaaagaagcaaggtatggggagtatcttagtagacatgaattagatagttgattaggttaatttaaccttcaattctttaagattaatccatgtttttccttatttaataaggcttaaagttaggcatatcatgtgtttgtaaaaattcctcaatgaactaggatagtaaatagtctataacttgattacctaattagtctaataattaagtggttgtccaaaataattaagtctactttgtggccataagattacttggctgtattttaattttaatgttgttgtatgttaatttatttcgttgtatattgctgtaattgtaatttaagattgttgtaggttaatttattgtgttgctgagaattgatttaatgatgttgtatgttgttgctgtatctaatttagttgtatgttgctgttgctgtatttaattaagttgttgtatattaattatgttgctgtagactgttgtatttagggtggctgtatgctgtaagtaatgttgctattgttatatttaataaattttgtatgataccatattgctgtatgttttattcggttgctgtatttaattaagttgttgtatcatattttatttgttgatatagctgtatgagttgatggaactgtatgatattttcacaatcacttgaggttgagctatgatgaagatttgatgcctattttattagaaattaggccatggacatatgatttatgtctctaaaagaaattatggcacacttgtatcttttatatgaaattaattttgatgaagtgatggtgccaaaatcaagagaatttgaatgaaaaaattatcaaaggctaactgaaaataaaagaaaatcattacatttatttttgcatttttcctcggagtggagggagatctcactggagtgggtggaattgtatggtaccttttccctcggagtggaggaaggtctcactggagtgggtgggactgtttcactggagtgggtgaaactattttaatttctggtacctttaattaggcctttaagatctcagtcatgcatcatttaataaagaaatcatgcatcatttcccatgtatctgtttctgtttgtaaatgataatttattcgttaattatctgtgatgttattttaattttctgtcgattatctaatcatgtttattaaatacttacccgagttgtgtctgtggtttgacacctgtgatgaccccaattactttgggcgagcagaggaacagtgattagttgagacatggagaagcttgatgaattttatgctgtgttttggcttgacgtatgggtgatatcgtttgctgtgactgcttttgagagttatgtaattcatagggtactacttgataatggtctgtattttattatggatgactgtacacggactgttttacttaactatgcttaaattaactagactacgtattatgttaaatcattccaacgtagcaaatcgtttagaatattcttttacgtaatcgaatcacgtagaaaaaatttcagtaaaataaaaacgtagtcgataaaaagggaatcaacgtaatagattaaaataaggaaattaaacgaagtcgttataccaatagttccacccactccagtggaacagtcccacccactccaatgagaccaccctccactccgagggacgtaattaaatgcgaatgatgtatggattcattattttctttttgttactcctttgttcctcaaattctcataacttttagtatcaaaagttctattctcccatcataatcaagtccaaatacaccataatttcttttagtgtattttacctttttcaatatctttaaatcatataacataaaccatatgacatagaactttgatacaaattaaagtgacatattacatagataacatctcacaacatcaagtacaaggcaagattctttatcaagtgagtaacatacaaacatcaccaaataaaatataatcttaacacaaattaagattctttattaggtaaataacacacaacaacactaacataacaaagcaatattaactttaataaaacaacaataaaatatagatatacttctttgaagcatttttacaaacacttggcattcaatacttaaagcttattgaaatacatattatcctagcttagattttgtagaattagatgatatcataatcatatttaattatctaaacatgtataccatagtactccccataccttaactttttccttgttgaattcaagctaccttttcccaagaatcctagctttttcacgtgaacttctatgggtgtgggctgctgttttttgctttgttttttgagtgaataggagtgaaaaggaaaggctgaagtggggttgctgtccgtgaatttccagtccccactttggttcccatttggtttttatatactaagtttctttaccttttggttgaaaaatctcctaagcttatgatggcttgttttctagttgctattttctaattggctagagtttcttcaccacacaagtgtcctagttcaagataattctaatcctttctacttccagctagtttcttacgtgaaattcttcagccatagggtgttttatttgcttaaaaactatgtagctttaagtagatttttagtgcagatttttagtgcatgtataattacctagctttccacttggtcctattatcttcctttttatttcttggctgtccatgtgtctttattctcaagttttctgccttattctcaagatttctacagccttctccatccttcccttaaaatacacggccattctcaaattttggagcaaatatgtttaatttgtgttttttggcctaaaccgtgagatagatttgttttagaggtttttatttccttaacatattttcttatattagtcacaattatttctataatttatgaaagcttaatttcaattgcttttcttttaaattttctaaaattggttagaaactagttaaaaactagactaggttttagtaataatttttgggatgtttcttatttccttctaataacttctccaatttcctattggtttcctttgtttttaatttaataaaataactagacacttatttaagaatccatttctttcatgattaagagaaaaattcctagattgcatctttcccttttctgtgttttataaaactcagattagtctgtattccatttttctgagttatttttcgaaatttctaaaaattttatttcatagttttctttattgaaaatgtcactaattttctatttaggagcatactagacttttgtcaggcttccataaccttactgaggttttctggctttatcagagctaaaaggatattttgatcatttgggtaaatgttcaggggcattttagtcttttaccctagggacctaactgtcatttgtgaaattgttcaaggacattttggtcattttcaaaaattgctaagggcatttatgtcatttattttagaaatgcagatttatcagaaaatgcacatatatatagaaatctgaggtgttacactaaacgcattcataatcatgaaaaacagaataacaattgaagaagaagatgaacattcaagtagaattcgaaatactaaaccagaactccaattctccttgtgcttaggttggttccttggattgattggtgatttaaccttccatgatcatcatcaatgaaagccccatggattgagtgcacgaaaatggaagaacagaaaaatgaaaatgaagaacaatgaagaacaaggaagaacagtaaagagaaaatgagagcaagggttttgatctaaaaactaaaggaatgaaaaataaaacttgtttattgaaatgtaaagagtggtgtccaagtttcactaaagtcactacatatattagtgactaagctctgaaaataaaatgggtcacaaacaagcccaacaatctaattattttctatttacaaccatgaaagtcaaattcgcagcccaaaattataagtgcagaggcgctaacttccaagcttaaaatgaccctctaaatgacagaattggactcgggctatttctagcaaacttgtagacctcttcgttatctttctagggactcctagaatgctccattcggagatcggtagcaccctataggtcctacacaagtcagatacgtcaagtgagccaaaaatacgcaacaattagtaattaagcccacttacttgcctaggcccaaaactgaattagaataggaaaataaaggtccaagagaggtcaaataagctaagaaggatagaaaaatactcaactaaaagcactttatcaaacaacccttcacatcatgtgaataatgactaacaaatcatgtaaaactccatgactcttagcaactttgattttctcttctccctcttgcctttgtgttttaagaactcttgaaagtgattttctcaaggcttgtacgaatatttcacaaaatacttgatatgcaaactcagtgcaagttgttctatttataaaaagaaaaaacatacttaactaactgtaatcgattatttcgtcaagataatcgattattttaactgatgtaatcgattattttaaccaaataatcgattaaagtgttcatcagaaatctggaaatatgtcaagaacaaaataatcgattaaggcattttgtaatcgattattccagatgacctgagttttccaatacacatgtgtaatcgattaaattcccaaataatcgattatcacagacaatgttaaaaacacatcaatgcatatttaatcgattacgaatatctggtaatcgattaaaccagatgaaaatgcatttgtaaaatatgcagggactcagataatcgattattccgtaaagtaatcgattatcacagagcacgtctatttcagggttaagcacatttaatcgattacgaatcaatggtaatcaattaaaatgttcataaggcaatatacaaatcaattcacatgcatttaatcgattatatcatatatgtaatcgattaaaacaatacaatttttataaaaatctaattgcctttaggagtttatatcaaaatgcttattaccatatgattaaacatgattaaatgtatgtgtgaatgcatgaattaatcaagattagtgaggatcatgaagctttaaccacttgaaccaagcttgagcaagatattacaaatgccatcaattgagtgggcatgtaaaacatcaaaacttgcattcttcattcttcttgattccatatcttcatcttcctcatagctaacaaaatcgtctttgtatgtcaacatatgacatacaaagatggttatctcttaaaaatcgtcttcgtttatgttaaataaataaaaaagaaaaaagttaaaatggaaaaaaagacgatttttaaggaaaaatcgtctttgtattgttgatttgagggggagttacttgaagcatgaagaaaattgaagacatggaaatgttttgggctttcaacatgtttgaagatttgaagaaaagcttgtgatcaaatgtaaaaggaaggaagttttctgatgatcaaagtcactgcattcataccattcataagcatttaggattaaatcacaaaggcattaagtaattgttttgaatcttgaaataagctaagtgttttggaaaaataacattgcactgatttaatcgattaaattaagcaaagaatcgattattttgttcttgaagctttctggaaaatcctcaagaacagtttaatcgattacactatcggaataatcgattatttttcctttgatctcttagaatcttctttagtgacttatttaatcgattaccactcatctgtaatcgattacattactcatacagtttatattatcactctggcttaatcgattaccaattactgtaatcgattacgtagttcaaacatgctttttatattgtcggatataatcgattaccaattattgtaatcgattacatagtacattcttgtttatacatgtttcggatttaatcgattacgcatcgggataatcgattaaattgctcgttgtggttacccagaatccttatgaacactttaattgattacaggagcgtatataatcgattacatatgctaaataatcgattacaggagcatatttaatcgattacaagcggttatgaaaattattataaatagaactattgctcagctgttttcctaacttgattttttcgaagtctaagcgttcaaaaggtttctaaacattctccaagtgatttttctgggtttagaaagctcttgcttccattaaactcttatgggtgtttaaggattgagtgaagcaagattttcttttcaaagatcaaggaaagctatgttctgaatttgttgcttgcattaacctggtaaattcattccatgcatatcaatctttggatcatcaggtgatttctttccttaatctttgagtgctgtaattttctgttgaaacttgtaattgacttgtctattgtattttgggttcttgcttgtatttttagagatagtgtttctctaagggttgttgggtagtgttctcagctgggtttggtctctaaggatctaatagggttttagatctctgaactttatctagggttgataaagagagacttgtaaggatcttgtaagaactaaaatttgcaatagtggaactctactctagtgttgagtagaagaaaactggatgtagcttcatagtgtttgaagtgaaccagtataattccttgtgtgtttgtttaattctgcatatttgattgttttatgtgaattcttattaactacttgattcttgaagcattacatctcttgggttgattcttggataaaggttcttggttgtgtttgtgataaagatccaaagggcaaaaactctgattttgtttaataatctttttttaaaattaccaagcctaaccaattcaccccccccccctcttggttaagtgtgaagtcttcctatattttacaattggcatcaagagtaggtcttgtaagacactcaagatcacttttccttcaaaatgaatacttcacaaataacctttaaggaagatgcatccttaaacagacctcctttgtttagggggagcatttcagtttttgaaaaaatagaatgaaaatctttattcaatttaatgatccaggagcatggaatgccatagaaaagggtcctagagtgcccatcaaggtagtagataataacatgattcccaaagattgggatgagatgaatgatgataaaaagagaattgttcaatatgattttaaaggttcttgtttgtgtttgtgataaagatccaaaagggcaaaaactctgattttgtttaataattttttttaaattaccaagcctaaccaattcacccccctcttggttaagtgtgaagtgttcctatattttacatgtatgtcaacatacaaagacagttatctcttaaaaaccgtcttcgtaggtgtaaaaaaaaaatcaacgaacacggttttttagaaccgtcatttaaagttcacattttcaacgacacacgcaacaacgatgattctatgcctgtcgtcatatgggtttttcaacacaaaacaaaaatttattaaggaacaaacgcaaaaattaagtatttattaaaaataaatacatatttaagtttttattaaatttttatgcttttttaggcatagttgaaaaactaaactgatgaaatgttatatatatatatatatacacacacacacacatatataagaagatgagaggaattattttagaatataaaaggaagaaggtcagttagttagggaaaattaattttagaataacgagttatgccaaaaaaaaactttgcaatgatgagcttaaaaaataacattttaaaatcaacgtgggtatgaaaaatcaaaatgcgagatactgtttcattgagaggattatcaataaataaaaaaaaatttggtagataaagttaatatattactgagtatcattttgaaaaacatggcttgaaggatattttatacagatagaaaacgcgctttataggttcattacacttctataaaaattaaatattactacattgtccagggcccacaaactataagtggtaaataacgtggcatttcaataggcatgtcaatcctgatacaggctcgtgcttagcaatcaagttattggaccaaataggttatctctaacacctcattatttgaatattaattataatgttgcaacctctttatcaagtggaagtactcaattatctataagatacaaattatctatatgatacaaatatctactatctagtatctacaagctagtaattatctataaaggttattacacaactgtaacaactacgacaaacaaggacctacaactcttgctccacttgataagcactaggttctatctcaccctttttagaccacttattctcacctaactcacgtacttacttgatcatcagagtcctttgttttgtaggtcccctcttgtcctcctaacaaagggtgctcacagtccgacgagtgagatcgtgaagtcatcttggccatgtccacccagatgtgggtcagctccagattttggtaagtacatttggtgtacatcatggggctgcagtaaaacttaccttgcaacctctcttttccactaatggttagcacacagtctgtccttagacgtgagacccctcttgaaagctccaatcctcccccaacaaccatatcgaaaacaaacactcttcaacaactccagatgcatattacggagatgtagcgaccatgaccagctgaaggctcgtgtgagatgcccctatgacgatgagcactctgtacgtacaacgaatgaacgtactcaaggggaatcacacccccgacacaccgtcaacactccagacgaccctaatctatcacatatacactgcccagaagggcgaacgactcgtcaacgcccctttgtcgaccgcatcatggaagtcgacctacccttaggttggaaatcgttcaacctagagcggtacgatggaaccaccgatccagaggaacatctagacggttcctcacccaagtgaatctctacaccaatgataacacaatcttgtgtcaggtctttctaacatccctcaaaggggtagcgctgacatggtaaggagggttgataacaactgttgaatcgctacaaaacaattaaactatgctaattttgtagcacaggattaacctaggtcgactcagaaacacgatcaatttggttcaaacttcaatttactaataaacaataggtggattttaatcaaacagtttgtaggcaatcaataaaaattgcagaaacacaaacaagaattgaagaaaaatgcaaaactaatagaattgataaaaggtgttgtaaaatagattcaagaatatcaatccaattcaccaaaccaagcaatacaaattatcatagttcttatataatagtcatattatgaaggttcattcaatatcattagaaacagttcaatcgaattaactcctaaatcaattgaaatcacaaatcggattgaaatatcatccaaacaatctatgattaaaattcaaaattaggaaataactctataacctaattcattttcaatcctaaacatattcataatcatgaaaatcgtaaataggatcgaagaagaagatgaacattcacatggaaattagaataccaaacctaaactcaaattctccttgcttggactggatccttggattgattggttatttagccttctatgatcatcaccaatgtaagagccatgaaatttgtatgagaaaaataaaataatagagatgaaaggaagaagaaaaataaagaacaatgaagaatacttgagagaaaaaaagagaagattttaattatgaaaacttctaatagaaatctacaaattctgattgtgctcaaaaaataaagtgtgtctctccactaactaattgcactaaagtatagtgacttagtcactaggaaatgatgggtcatgattaggcccatctaatctaactaattactaattacaccaattcgcactacaaaactcaagtgcatgggttttgacttccaaacctaaaattatcctcaaaatgatagaattggccttagcttatctctaacaaaattgtagatcttttccttatctttccagggactactcatatgcgccatttgaatttctgtagagctttttaggtgcacaaggaagataggtcaagtaggcaaaaaatccgaaaataagcaacaattatcaattaagtccacttgtttgcctaagacaaaaactgagttagagtgaggaaataaaagtccaagaaaattcaaataagctaagaagaatagaaaaatattaaactaaaaaaactcaatcaagagctctcgtcgaggtccatcgacaacttcaacacttttgtcgagcatttcagttcataatatgcaaccagcttgatcacatcgcatgactttcactacgttggtcagtctgtgacaagtagattatgaatcccatcgaaagttcatgggcaggttcaaatgaatcgttatccagatccaaaacctcaacctagaagtagcattacataccatgctactcacatttcgacctggtaagttcgcagacaatctatgcaaaaaacctcccaacaacatggatgagttgcgtgaatgagccaaaggctacatctagatggaggagatgtcaaagttcataaaagaggtccaacaagtcagaaaaaagcgcgacaagtgagaaggaggtatcaagaccgactcacataagtcaaacaaacgacatatactggacaagcaccaatctatctcaaagggacctaggcacgagcactacacacccctaatggtcaatcaaactactatcctggaggaggccttcaacatagagatacacataaagctacctccgtcattccctcctaggacgggttagatagaaccaaatacgacagataccatcgtagttatggtcacaatacaaaagattgttgggctctgaaagataaaatagaagagctctataggtggggtatctagcccagtttgtgaaaaagcctgacaatcaccagtaggagcgagaccagggggcatcaagaggatcatcagagaaattatgatgacgataaaagaagagacagagcaaaagatagagggggaaaaaggcactaccagcaaagacaagagcgtcaacctccacaagaacaggaaaacgagctcgcccaacaaattcgaggtgtaatcaacaccattgtaggcggattttcctacggagggcatctaaaagcggcatctccactccatctgagacattgacatcaactatttggatgtgccatcaccacaaagtctctcttccatcacttttattgacagagacttcaatggcatcagccctgataactaggactatgattgtctccattgtgattgctaatttcatggtgtccaaggtcctcattgacaaaagtagctccacaaacatcctatactagaagacattccagagactccaagtctcgtcagacacagtcatcctcaatctatacctctcctcgactttgtaggagagagatagagaccaaaggctatgtagacctcatgaccaccatttggtcaaggccagctcttaaggagcttcatagtaaggtatttaattgttgatgctgataccttgtattttgctttgattggaaggaaaacgcttaatgaacttagagccatcgtctccataccaaatctcaagatgaaatttccatccttgatgggagagatcatgactgtcaaggtagacaaaaagcaagcccgatagtgctatgttgaaagcttgaaagtggcatcatatcctcccacaaaggagcctagcaggcgctcaccccacagcggttggtagcaaccaagtcatgagtatggacgaagggtctccaatccaaaccctgaccttctacgaagcaagtcaagatggcatattcaatgtgaatccgcaagacgacaccattggcaaaggctcaaaggctattgaagaacttgtcaatttgtaggtcaaactcaaactcgtggagtgtatgcagcttgatgtatgtctaaacccattagacattgatttcccaaatctaccttgcaatgaaacccaatcttcaagaatctttcaagaacacaagctttcctcacttaacgtggaacatggggttggaaggaagctttcatgtgcagcaatggaagatggagaaagctaagggatgaagatggaagacaccatggagaagctctccaataagtctaggaagaatcgtcacaatagcattgaaaagtcattgataagacccaagaagttcttgcacaagaacaagagagaaactcttaaacaaattatgttttgtattcaatgatcaaaagtgattacattcagttttgggcagccatatatagctactaaattacaactaaatgcaagggaaattacaaatgaaatgaagcttgtagtgcaaactagtgaagcctaatgcaagctaatgaaagttgaggtgcaagcttctcctaatgtgactcttggctgatccaacacgtgccaaggtgaagtatttttagcttacaatggcagccaacaagcttaaagagatgctacacaatttacacacaaatacacctacacctctttgcataattgcacctataagtctttttattttcactatttttgctacttaacaagtgctgaaattaaatggaattaaattcaactttagagtacaaaatccagcccttgttctccttgagttggtgtgcttcttcatgcttgtcaaggttatctttgatgtggtcttgaagagcttgagttctagctctctacagctaaccaaaggaagttcttcaagttctccttctagacctttagcttacagtggacttccatcatcccctccttcttgaaaggaacttgacctcaagttttcttcctcacttgtacctacatcacacaaacaaagatcacaaacattaaaggtattactcacaccatgctcacttggcaactcaaaattatatgcattgttgttgatcctctctaaaatcttaaaggtgtccatctcctctaggttggagctctgatttcctttcttgaggaaatctacccttcctcaaatgaagccaaaccaaatctccctcattaaagatcacttgcttcttgtgcttattggcttgcttagcatattgttccatctgcctctccacatgggcctttacttgttcatgcaatttcctaacataagaagctttagataaagcatcatgattaatcatggaagaagtgttaggtaatggaaataaatcaagatgagttaatggattaaatccatagacaatttcaaaaggagataaggaagtagttttgtgaaccactctagtataagcaaactcaatgtgaggtagacactcctcccaagttctcaaattacccttgatgtagcatctaaggagttaacccaatgtcctattcaccaccttggtttggccatccgtttgtgggtgacaagttgatgaaaataagagctttgtgccaagcttaccccgcaatatcttccaaaaatggctaaggaactttgtgtctctatcactcacaatgcttctcggcaatccatgaagtctcaccacttccttgaagaagagattggctacttcacaagcatcatcactcttgtgacaaggaatgaagtgtgctatctttgagaacctatcaacaacaacaaatatagaatcctttcccctcttggatcttggaagaccaagcacaaaatccatagaaatgtcaacccaaggggagttaggaataggcaaaggtgtatataaaccatggggcattaatctagatttagctttatgacaagtaatacattgagatacaagcttatgcacatcatgcctcatttttggccaaaagaaatgttcatgtaaaatagccaaagttttattttcgccaaagttccccattaaattgttttcatgagcttccctaatgaaaagttctctcaaagagcttttaggaacacatagtctcttttccttgaacaagaaaccatcatgtctaaaatatccttgatgagcccccttctcacacaaagaaaatatcctagagaagtcatgatcacttgaatacaattcctttatgtgattaaaaccaaacaatttagtttcaagcatagaaatcaaacaatgcctccttgataaggcatccaccactacattcaactttccttgcttgtgtttaataacataaggaaattgctcaatgaattcaacccacttagcatgtctcttgttgagttttccttgaattttcaaatatttaagagactcatgatcactacatatcacaaattccttacgtaaaagataatgttgtcaagtttgcaatactctaacaagtgcatacaactctttctcataagtggaatagttcaaacatgcacccttcaatttatccctaaaataagcattaggatgtttatcttgaatcaaaatccccccaatgcctacattagatgcatcacattcaaattcaaaggaagcattaaaattaggcaatgcaagaataagtgcatgagacaacttatccttcaatgtttggaaagcaatttcatgttcttatttcaaagaaaagctcatggttttctttatcaattcattcaaaggagaagcaatggtactaaagtccttgacaaatcttctataaaagcttgttaaaccatgaaagcttctaacatccttcacactttttggaattggccactccatgatggctttcactttctcttgatccacttactctttgagcacctactacaaaacctagaaacacaacttgtgaagtgcaaaaagaacatttattactttctccatacaaggtttccttcctaagaacctcaaatacacttttaacatgcatccaatgatcatttaaattggcactataaacaagaatgtcatcaaaatacactaccacaaactttcctataaagtgtctaagtacatgattcataagtctcataaaggtgttaggtgcattagtcaaaccaaaaggcataactaaccattcataaagtctaaatttatttttgaaagtcgttttctattcatccccttccctcatctttatttgatgataaccattcttaatatcaattttagaggaagtagtagcaccatgcaattcatctaaaagatcattatgtctaggataggatgtctataccttatggtgatgttgtttttgccctaaaatttgtgcacatgatagagtgcttttagttgaatatttttctatccttcttagcttatttgacctctcttggacctttattttcctattctaattcagtttttgggcctaggaaagtaagtgggcttaattactaattgttgcgtattttcggatttttgctcacttgatgtatctgacttgtgcaggacttatagagtgctaccagtctccgaatggagcgttctaggagtctctgaaaagataaagaaaagatctacaagtttactagaaatagcccgatgccaattctatcatttagagggtcattttaagcttcgaagttagcacctatgcacttgtaattttgggttgcgaatttgactttcatggttgtaaatagcaaataattagattgttaggtttgtttttggtccattttattttcataacttagtcactaatatattagtgactttagtgaaaacttggacagcacacttacaattaaataaacaacttttacattccttttctatagtttttagaatcaaaagcttgttcttcattttctctcatttgatcttcattgttcttcatcttcttcatttccattttgctattcttccattttctgcactcaattcatggggctttccttggtgatcatcatggaaggctaaatcactaatcaatccaaggatctaactcaagcaagagaagaattggagttccggttcagtatttcgatttctacttgaatattcaccttcttcttcaatttctattatgttttcatgattatgaatgcatttgggattgaaagtgaattaggattatggattcatgtcttgatttcaaatgataatcacaagattaattgaatgatatttcagttagggttgtgatttcaatcaatttaggagtagaatcgattgaaatacttctattgagattgaatgaatgttcatgttagaatcaacttatgggaatgatgatgattcaaatagcttgggttggtgaattggattgatgctttctaatctattttactttactccttgataatcttgttaatttttgcattgtcttttaattttagtttgtgttcttgcatgctttactttacgcataccaactgtttgacaaaaatccccccttactattaccaatgatttgaagctagaaccatattgatcgtgtctctgagtcgatctaggttagctctgtgctacaaaattagcttagtaaaattgtttttgatgcttctcgacaaagcaaatatcagaacattctccatattccatccttcttaggtacaagaataataggcatggcacaagggctcatgctctcacggatccaccctttgtcaagtagctttccacttgtgtttgtatctcttttacttccatgaatgaagtcttatatgctggcctattagggagtgaacaacctgaaatcgaatcaatttggtgctctatgcctcttaaaggaggcaagccattaggaatgtcctttggaaaaacatcttcatattcttccaaaagagattgcatagctttgggcaatttttctccttctttttcaacatgtaaacaaagagatttaggaaccatataataaagaggttgtttggctaataacactctcttgatttccttttcaatcaagaacaaactctctttaatctcatgaatttgttttgctctcattttctttctcttttattttcttctcactagtttttctctttggtagctcactattcttgcccttttttgtgcaatattgttttttcaagtgcagtattttttttcatttcttgaattcttttttctttcatcctcacttgatcttcacacacttgtctaggaggcaaaggcctcaaaataattttcttgcctaagtgctcaaactcaaaagtgttctccatgccattgtgtatgatttttctatcatattgccaaggccttccaagaagaatatgtctagcctccataggtacaatatcacaaagaaaattatcattataagaattaatggaaaaaggaataagcacttgagaatttaccaccacttctccactctcactaagccattggagcttgtatggccttggatgctttgtgattggcaagtgtaatttctcaagaagccttatgctagccacattggtgcagctgcctccatcaatgataagtgagcataccttgtcttcaactaaacaccttgtgtgaaaaatattttctctttgagtctcctctttttctaggcaaaaattgctcaacattctccttaccatcaagagatcaccctcctcagcctccacaagtgtaagtcttcttcttcttcacttgaagaactaattgagacacttgaagactcactctttatgcctccatcctcaagcaaaatcattgttctcttattgggacatattgggacattgtgaagcaatatgacccttaccaaggcacttaaaacacttgatattgcttgatcttgttggagttggatccataatttttttgcttgagctttccaccttttcttctttatttttcacttgagaaacctccctcctaggcttgtctttccagttaggagttgcagccccattggtcttggaagcttttctcctttttagttgctgctccaccctttgagctttgtggactagctcctctattgttgcataagaatgtagcttcatcacatcttgaatttctctattcaagccatgaaggaacctaaccatggttgcttcttggccctccacaattttatccctcatcatcatcaattccatctccttatagtagttatcaacactcttgtagccttggaatagtctttggaggctgttgtggacctctcttgcataataagtgggaacaaatctttctctcaagcacaccttcaagtcattacagcacttattcgttgtctcctcaacctccctatatccatttgaatttggttccaccacacattagcatagccaccaaattctagagttgctagaatcactttttttcttcttcatcaaattgttggcatgagaaaatttgttctactttcatctcccactcaaagtaaactttgagatcgtaagtgccaaggaactttggaatttttattttcacttcactcaatcctccattcctcccttctctctcttctctctcttttcccctaaacctccaatcttcctcatctctattaggcctcctaggattttgtctcctattattttctcttctattattgttttctctccaatcctccctctcattcccctcattttcataatttcctccatgagagtatgcatactcactcaccctcctattgccatgagcctctccatccacacttccaattggattactccttctttgggtctccctttgtaactcctcaaatcttgcatccattttggtttttaaatcttccatttgttttgtaatggccttcatcaacttagaggtcttaggtgacaaagcctcttctcctcttgagctcatgcttaaaaagacatagttagcaaaaacacaagtatataaggaaattctcaccactctctaagtgtttgtcactcacacttgtgtttgcacactttatctaggctctttctttaatgttgtctcttgccttttcccactcttgttcctctctatagttcttaagcaaaaactcccaatccaatcaaggttctttactatagtgaaataggaaacaattctaggctagactcaagagtttaagaacaagaaaactctaagacaaaaccttggaaattttaagagacaagcaaccaaagtaaaattttagaaaagcacaactcaaattggaatttaatgagacaactcaaggatatattggctggaccaaactgcacaaggaggatataccaatcaaattcaattgttagaagccaaatttcaccaaatttgcatgtcattcaagttcacttaattttgtggttcaaaggaaatttgaacttgtagctttgtaactttgcttttcttctaaattctgtttttaattttaattttccagccaccaattcaatgatttctttggttgtacctaattgtttttcttttgccttttcttgtttctttcacaaaaattttgtaagcttttgtttttcttttgtacaagttcaagaaatcttaaagaaacttaatgaatcacaaaaaaaactatgtataacaattgtaaaattttcttctaacaactcaattcagtttaggcatgagattagaatcaaaacaagtggttatacaacacacaaactgtaacaccctgaaattttgataactgaaaatagatgtttgatataattgttgtgttgtttgattgcttgattaatttagattggttgcgttgttttgcctattaccctaatacaattgcttggtgtgaatgttaagttatgtgaactttgtttgatttatttttgtaatgtgagagtgatagtttgatccataacctgttttggtaaaactaccatcccggattcattaaccgttggatcgtcatcaaattttgacagtatcttcccaactcatctctgcattttttgatagttgggatcttcaagatgacaacttttgatgtcgctaagtgcgacatgcgcgcttagcgcaattcccaaatatttccttacagagagtaaattgcgttgtgcaggacatggcgagctgagcaggactgtcggattataaatacgtccaacagcatgtagaaatgtattttcacaattttctctctccttctctctctaaactcacccaaaaaccctaggaactccctcaccaccaccacgaccaccatcaaccaccacagaccggcgttgcttgccacgagaccacagcatggagaggaacctcgtaatcggagcagaatctttgaaactcctctcgaagtttcgatagagaacgaagctcccaattcttctttcttggtttccttaaggtaatcttggtttcctttgtcttcttctagctagtttaagcttatcttagtgtctcttgtgttttgggtactgttattgggattttttcactttctttgaaaaccttttgaaaatgagatgttgtaaaagtctcctttttatgaaattgatgtcaattctgtgagccttgttgaaccccggtcacattggtgtgatcggaatttcaaaatgatgtcttttggtgaaaactcccaaaacacccttttagcccctttttcgattttagtgggtatttgaccccaaatgttaatattgatcttaccttagaaatctatgctaaattgtcttcaatttggcatatagagctctgcatttagacgaaaacacacatattgaaggatctcaaaacaacactacgaggctttcacgggagaaatcatagttaggtaaggggagttaattattcggttatagtttaagttccatagttgggggccagggagtccaactatgaggataactgcctgtccctgttgtgcgcttatttttcaagaaaaactatgtttttaactaatggaatgcgatgcatttatgattaatgtgtgtttatccctgtgtatgcttgttttcaagaaacaaacgatgttttcaactaatgggatgcgattactttattattgatgtttatgatgataatgttgaaatgaaataatggtgatgtagttgatgatgtacaaatgagataatgtggatgtggttgatgatgttgaaaatgagatgatattgatatgtatgatgatgatattgagatgatgtgatgttgatgttgataatgacattgatgagagatattgttgatgtaaacaatgtcattgtgtgatgtggacacacatggatacccatggggggtgcatgacgggttacccttgcgaagaaggatgtgttcctagccagatcatgcattaatcgtggccatggttgtatgatgtgtgcgtccacctggggtgcaatgaccggttggttacccttgcgagaaaggatgtgttcctagccacggtcagtgcatcggtgagcccacattggtgtgttatgtatgtacatagggggtgcatgacaggttacccttgcgaggaaggatgtgttcctagccgggtcatgcattgatggtgcccatgtttcatacttcatattgcatagatggaaatagaatgatagacagtaagtaccgagggtactagggggcaatcactctgtttggaactcctttgtgacttagggttgatcaccatggaggggagcgaccagtgcatgacagggtgacctcaacgagctattgcaacattttcctagagaggctatttccatgaggatggtaccacattgcattctgagagatgagtcaggtgcatgcatcattctgagcatgattgctttgatttgtgaaataaagtggataactaatttgttgagtgtatattgaaatgatgtattatggagaaggaattgtgcttgttattattgtttccttcaaaattattgttaccttatacttgttatttttgtataaaataaactcacccttgcaacttttttgtaccgtgtggttggtacctgtgatgatcgtgaattttcgttcgtgggagcagatgagaggtagtaggtgactttggagggaaactattttgttggaaccgccgagccaacgtgataatgtcagaattctttttggaaaagagttgtcttttgtaaatcaacttttccttagttagtctattgattcttttgttggaaatgtatattccaagcataaagatttatagatacaactaaattatgtactgttacgtgagtgatatgtaatgtttcaaaatatacatgcatatgtatttaattatatattcgctcgttgtatgacaagtgtattatcgcgaaaaacttactacattttcataatcaaattaatggagttttcattaaaattgaaatttacccgattagaattagtgatatcgtagtgacgaggcgggtcgttacattagtggtatcaaagcaggtcgaaccttttcagccgatgagttgtgagtctactatttttctctgtgcattctgtgtttgcttgttggatttttgatgtttggagtgattgcctgttttgtagttgtttgaattgttttgttgagacttgcatacattgttgtgatgcataggttgtggagatttcttgggggtggtcgtaacatgtttgtaattttgatgtctattataccatgagttccaatgcctggtcacgagttatcagacaggccatttgggttattcatgaagtgcaaaggaacattatggcaagcagataggaatacaaagagtgaatgataagtgttaatgtctcgaggcagaactattgtagatgagtgatctctcaaggcatcaactctcaatagtgattaagtggggacttttaataagtgtagaattgtcttgttcttttgttgtgtgttttccttctaagttttcacttcttggtgtgtgcaggaagtgatggccggtaggaatgatcgtgctatagctgatgctctccaagccttaacttaggctttggggaatcagaatataggagaagttgctaggtctactgagtatcaagggttggatcgctttcagcgaaacaatccccctaatttcaatgaaggatacaaccatgatggtgctcagaattggatacgagagattgagaaaatcttccgagttatggcatgttcggaggagtagaaggttgcttttggcacctacattatagtagaagaagctgagtattggtgggagagtactcgccaatgtttgaggctgaaggtcaagttgtgacctgggagacctttaagagggtattcctagaaaagtattttcctgaagatgttaggaataagaaggagatggaatttctggagcttaagtaaggaaacatgactatagctgaatatgcaactaagtttgaagagttggtgaggtactttcctcattaccaaggaagaggtggtgaaagctccaagtgtgtgaagttcttgaatggcttgtgacctgaggtgaagcaagttgtgaactatcaaggtgttcgtcagttccctctgttggttaacatgtgtaggatatgggatgagggccttagaattgtggaaaaccgtacccaaccccttctaagcaatatggtcatcatcccaacaatcaaaggattggctgttacggggttctctggttctactggtagcaaacccactactctttccactcagatattttgtttcaggtgtggtaagctaggccttatctctcaaattgtatgaataaagaccctacctatttcaagtgtagacaatagggtcatattcaaagagacttcctatatccaagaaagagcagaatgatggaggcctaaaggactaaatcggacatccgaaagccacgagaagagtctttactcttaatggtgctgaagctttgaaatccaaagatctaatccaaggtaaatgtttcataagtaggattccgttacttgtgcttttcgacttcggtgtgacccattcgtttatatctcgtttgtgtgtagagaaacttaaaatttttgtgtcttctttgaatgatgatcttgtggtagatgataagtgatgtcgtatcgcttcaaaacaattaaactacgctaattctgtagtacaagattaacctaggtcgactcagagacactatcaatatggttccaacttcaattcactaataaacaatagggtatttttgtcaaacagtttgcatgcgataagtaaaaattgcaaaaaaatgtataaactaatgcgaattgataagaggtaatgtaaaatagattaaagagcatcaatccaattcaccaaaccaagcaatggtaattatcatagttctcaaataatgattctgttatgaaagttcattcaatttcattagaagcagttcaatcaaattaactcctaaattaattgaaatcacaaacctaattgaaatatcatccaactaatctatgattaaaattcgaaattagaaaatgaatccataacctaatccattttgaatcctaaacacatttataattgagagagtgattttagttaaatttttatctatcattcttagcttgtttgacctcttttggacttttattttctcattctaattcagtttttggcctaggcaaataagtgggcttaattgctaattgttgcgtatttttggatttttgctcacttaacgtatctgacttgtgcagggcctatagagtgctaccaatctccaaatggagcgttataggagtccctgaaaagataacaaaaagatctacaagtttgctagaaatagcccaaggccaattctctcattttgagggtgagctttgaagttagcacctctgcacttgtaattttaggctgcgaatttgattttcatggttgtaaatagtaaataattagattgttgggtttgtttatggcccattctattttcagaacatagtcactaatatattagtgactttagtgaaaacttggatagcacactttacaattcaataaacaagttttacatttattttttttgtttttagaatcaaaagcttgttcttcattttctctcaagtgttcttcattgttcttcatcttctttatttccattttgctaatcttccatttttctgcactcatttcatgggactttccttggtgatcattatggaaggctaaatcattaatcaatccaaggatctaactcaagcaagagaagaattggagttccggttaggtatttcgaattctacttgaatgttcaccttcttcttcaatttctattatgttttcatgattatgaatgcatttaggaatgaaagtgaattaggattatggattcatgtcttaatttcaaatgataatcacaagattaattgaatgatagttcaattagggttgtggtttcaatcaatttagaagtagaatcgattgaactgcttctattgagattgaatgaatgttcatgttagaatcaacttataggaatgatgatgattcaaatagtttgggttagtgaattggattgatgctttctaatctgttttactttaccccttgataatcttgttaatttttgcattgttttttaattttagtttgtgttcttgcatgttttactttacgcataccaactatttgacaaaatccccccttattattaccaatgacttgaagctagaaccatattgatcgtgtctctgagtcgacctaggttagctttgtgctacagaattagcttagtaaaattgtttttgatgcatctcgacaaagcattatcaaaaatcatgaaaattgaatagaggattgaagaagaaaatgaacattcacacaaaatttgaaatatcaaaccagaaatcaaattctccttgcttgggttggatccttggattggttgtttgttttagcctcccatgatcatcatcaatgaaagccccacgaaattggtgaacaaaaaaggaagaatagaaaatgaaaatgaagaacagttgatagaaaataagagaaagggttttaattctgaaaacttaaaaaggaaatgtaaattttgtttttgctaaaatgtagtgtattgttcactaactaatttcactagcatatagtgactaagtcataaggaaagaatgaatcatgaataggcccatctattctaattaattgtgctatttacaccaataaaaatccaactcgcaacccaaaattcaagtgcagtgattctgacttcaaagcctaaaatgaccctccaaatgacagatttggccttggcttatctctgacaaacatgtagatattttggttatctttccaaggactactcaaatgctccattcggagttctatagagctctgtaggtcctgtacgaggaagataggtcaagtgagcaaaaaatccgaaaataagtaacaattagcaattaagcccacttgcttgcctaagacaaaaactgaattagaatgagaaaatataagtccaagagaagtcaaataagctaagaagaatagaaaaatatttaactaaaaacgctcaatcaaaatacttcacatttaaacatttgtactcctagccaaaactaaaagaaagactatagaaaaattaaaactaaagtaaaccaaaaattaaaagaaaggtatgaacaaggcacacacaatttccaatggatcataacaatgcacaaaagtgagaaagatgaaagatggaagaatgatattaaggtaacaaacaatccacgaaaacatgatcacaaagtgcaaactaaaaaagtaatcaagttaaaattaagaatgtaccaaggtgatagaaatctctcaaaggacaacactcaacctcacataatgtgtatggctttgtgtttacactcaaacaccacatgtaactagcacattcaaatattgacaagactctaattcattcaacttgaaatacacatgcatcaaaagatcaaaaggacgtttttagtttgtaatgaatggcttaggtaaagggtggataagaaaaagatatttaggctaaaactaagagaaaagaggggcaatggggagcaagccaacaagttaaaagaaaggtagaaaaaaagaaacaaaactaaaaggaatttacaaggatgaaaatgaaccacaacaacttttattgcatttttttttttcttttcctttgcttgaacttttttttttctttttctttgcttatacacaatttttctttaaacttttgctatttaaactcttttttttttcttctccttcaaaacaaaaaaataaaaataccccacacttgcttgaaacccactctcaaaacaatttcaaagccccttttctccctaaagctaggataacatggttttccattttttttttagtttgcaatgagctatacaagaaagaaaaggctaaaggctcagaaagggtgacaatggatatcaatacaaggataggtttatttggttagtggctaaaagaaagaaggactaaatcatctcaatcaaagcatgtgcaacaaggaatgtcaaaagaggcaaggcaaaacatagagtaatctagcacaagggtgaaatcatagatgaaagaatatatccacaaaggcccaaaaactcacaaggcataattctatcacacatgattcatcttaaattctatttctcaagcctacttatcacttcaacaattgcaacaatgattcacattaaagcatgaaacctccttctcaacccaaccaaagtgtttacatttctcacaatttatacaagttggaaattctatgaaaacatgaaaaagtgtctaaattctatattttttattttctgaattaaaaatagaataacaacaaaagaaaacaattactgcaatacaataacagaaacaacaaaaatagacaaaaaacagaaacaacaaaaatagacaaaaaaacagaaaataaccagaaataacaaaaacagacagaaaacagaaacagaaatagataacagaaaataaaaatagactgaaaaactaaaacagacaaacaaatagaaaatacacagataaacagaaaatagaaccagataaacgtaaacagaaaacaaaacacagactaataaatagaaaatagatagaaataagtaaacagacagaaaactaaaacaaaaaatagaatgtaaaaacagaaacagaaaacatatagaaatagaaacgtaaacaaaaaatagaaaacagaaaataaccagaaaacaaattttgttatccttcaccccacacttgaaatgcacattgtcctcaatgtaagcatgcaaataaatgcaaacaaatagacaacaaataaacgaagggaaaaggaaacttcccaaatgtcattcaagacacatcatcacacaaaattggcaagaccaaagagatgttcgccacaagctcctcctccacttgagggctctcatgaaatactttgagttggtgaccattgaccttgaagactttttcggtaacttcatttttaatctcaactgcaccatgtggaaaaacattagtaataacaaaaggtccaccccatctagatcgaagtttaccagaaataagcttaaggcgaaagttaaacaagagcactttttggccactatggaactcctttctaagaatcctagaatcatgaaattgcttcactttctccttgtaaatcttggagttctcatatgcttctaagtggatctcttcaagttcttgcaactgaagcttgtgcagaaactctatttgcttacgaattaatcgattatgagattatgcaatcgattatctatggcgttgctgcaaaatctgcaactgcccaattgacaccaaattcaaaattcaaatcttatgcaaatcatataagcttctaattactcgaaataactattacaacatttaaaattcaaaaattaaacctcaaaactctataaatacagcttttatgagagaaataatcacaccattctctcttctaccttgggcaatctgtgtgttctctctctctctctaagtctaaacctctgttcaatctcgttttcattcctaaccaaatatgtctgtccctaagagatcaaaatccaccaaaagaaaaattggtgaatcttctaatcagcagtaaatagattagatcactggttttctagtgagtcggagaaaatgacctatatgcagttcaatgccacaaaactcatctgccctcctaaataccttgaccttaattggtttgttgctgagggatttcagttccctacaatgattgaagcccagggtctgaagaaattagtagaactaaagggtacattttaccctgaattagtaaaggtgttctacacctatgctaaaataagtatggatggcaccatcctatctcaagtacatgggtggccatggagatcactcctgatgtttggcatgaggtggctggaatttcctttgaaggtgtaaggaaatttgatgaggaggatgagggctacaataggattgatacctatagagggatgcttcaagaccctcaaatggaaatgaagctaaggcttagcactggccccatgacatgtgaggacggactttttcactatataatcacttatgttctgactcctagatcatccaatcatgcccaagccacagatgatgatctacagattgtttatgggatgaagacctccgcacggatgaactggatcctcatcatttaggaaattatgttgaaagcttagatattgatcagttgtcaatttccttatgttgttttgatatccagattcattgatttttcgagattgatgtctctaatgaggttgttgacaacacaaataacatcaccagcctcatcaaagaaaaacatctacacaagcttggattggtgaagacaccttatggatggcagatggctggataaccacttccacctgcagatgctggagaaggaggagatgaagaaaaagaagcagaagatgcccctgctccacaacagtattctccatttgaatctctcatgattgaaaagatggatgctttattgtctctccaccatgagcatagagttgagactaattcacctatggaagagatgaaatctaggcttgagaatatagaagctagacttgttttttatgagtttgataaactcatttagttttcttatgtttgccctcttactcatgttatgtttttgttttgtttctatttgagtattaaagttttcttgattaatgtactgcactttccctttcaatgaataatattttagtattctccttgcttatgatatgtatattgctactttttgtctttgataagtcaaatagggggaaaaataatctaataaatagagggagaaatataataagtgatgtgtgtaacatcctaaaaatttaattctgttagttagagataaaaagagaaattacaaaaatgcttaaagaatgaccatattaccctttcccttgatatgagaattaccatattacacttgaagtggaaattacaaaaatgcctctggagtaagtaacaaattaacaaaatagccttgaatattttgaagtggaaattacaataatacccctagagtgagtgacaaactaccaaaatacccttgaatattttgccttagatattttgtagagttgaagaaattatagaaataccttggaatgacaaattaccaaattacccttagtaacagataaaaatcacaagaaaactaggagttcctagattggccgaaaatttatgattaggtaagccagaagataagtctttaaattttactacccattataataaatgcaagtaaataaaacttatagtagaaatgaagaaaattgcatgaatatctaaaagctatcatgagctacagtttcagaccatgtgataatatgatcacatgagaaacacctatgatggtaattgatacaagaaagataggatagaagctaatggattcaagtgacaagtttataagtgcttagaatatatttagttatgattagttaatttaagaaaagaaatcaattctagctgtgtaggattttgggcaaaggcttatattttaaatgtatgtcacatacttagctagtatatgaattggaagacacatgaagtacactacatataaattaaaagaaaacattcatgaggaagccacgttaaagtggctatgtgtgtgcatgtttttaagcaaaaacaaaagaaaatgcaaattgaagtatccatgtatgtgtgtgtaaccatatgtaatgtcttgaattttaaaacatgtaattaagcctagattaagcccatgattaaggataataattaggcttagtataattcgagaaaaggcttgagaaagagatgaaataggcagttccgggcatctcgcgcgacccgcgtgagatttcgcgctatccgcgcaggatacataaaacatgccaatgctttctaccatctcgcgctagtagcgtgggtacggcgctaatggcgtgggagccccgagcctgtggcgcgaccagcgtggagttggcgtgaatagcgtggcttggccgagttcatggcgcgatcagcgtgggaacggcgcaatcagcgcgggaccgacgaatttgcttttatataaagccctttgggctgaaagaggaaaggaaagagaaaagaaagggaagagagagaaacctccattgacgcactttgagagcttcatatcttctccatctctcatctaaacaccttggacccaactgagaaagttttcagagcttcgagataagctagtgacttagcttgattctcgagaaaagtcggtctacggcgagatcgagattccaaagggagctttcggaatcggagaaccaggaccagagaaggctttggctgagcgatccgtcttaggggaagtggtcccctagtgtgtctgagctacacagaggtaagaaactcgagctctagccgttggttctgtgtttgggtctttggttagattttgaacatcttgaggggtgtttttggaagtgttagagccgttattaggctcgaactctgtagagtcttatgctcagaggactgttctgaggagtttagagccttgaatcatcattactgatgaagtttgattttggctctaagtctgcatgggcagagataaaaggttgactatttgactagtttggaccttagagcagttgacaaagttgctcatgagatgatatagatgagattgaccgattgaaactggtgataatgagaagttgagtttgagctgtaatgctcagtgtggatgactggtgttgagtctagagggactctgaggcctttgtgatctgagatagaccattgaaaggtctatagataggcttatagaggatagcctgagaaacccttgagcatatgactcgggttgatgggaaggactgagattcctttctcagagacagttgaggactgtctgatgagctatgattgtttatgagcctgaatggtctgtgacatgtggttggttgccttggtagggcttgacacgaggtgtcagaggagcagaccatcgttccagaggctggaagtgcaggcacgacttgccaggtaagctcatcgttctgggggtgactgatgcatgccatacttgttgagatatatgtatgtgtgtgaatgtgcatgctgaggtgagaaaggccattgtggcctattatttgatgatatatatatatatatatagatatatatatatatatataatgtgcatgctgtgaactgaaaggccagtgtggcctgattagatgagtatatgtgatgaaaggcatgagtggcctattttgatgattatgtgtattgtgagccttaaaggctagatgaacggcgcttgaagtaatactcaggccgttccagatatgtatgtgaatgtatgatgaaccctaggatagacactgagaaaagtgtaagggtatttgacacctgtggttcaggtgggcattgggccgagatgtatgaacactgtgagtgttctgtgatgagatgcagatcctggtatgatctgtgatggaacctacaggatactgaactagtatcgggctagttgaggttccctagccagaggaagagtttgaggactccctggaatagctgagattccttgggaggtgccactgctctccgcctaaagtcctgaggatgaatgtttccttaggcagagatgattgaagtcccgagttgagtgagtcctcaggcattggggtgaagtcctgagatgactgatgcctcaggccttgtgtgtgaagacctgagcggagagattcctcaggcactaggtgttgagtaagacctgatgaggagatgtttactgtgatatagaggtagcctcctaatgtggagatgttcctatatccacagacgtagtcttcccaggctatggtaggagatgatatctcgtaggcatgtgattgatgtcatggtggacggtgctccctatgtggatgactccccaggcagttgagttggtagtcctgtgggacggtgctccctttgtggatgactccccaggtatgtgtggaagtcctggtggatggtgctccctttgtggatgactccccaggcagttgagatgagagtcctggtggacggtgctcccttcgtggatgactccccgggtcgttgagatgtaagtcctgatggatggtgctcccagtgtggattgactcctcaggtgattgtatgagatcgatatgagatgttcctgtcatatagaggtagctccgagtggggagatgttcctatatgtatagacgtagcctcatatagagtgtagggataccagtatgagatgtttcctgctatacagatgcagcctcatacagatggtagagatatccctagtatatagatgtagcctcctgagcagagatgttcctatatacatagatgtagctctgcgggatagagatatgtgtgatgaatggctttatgccatgaggataacctgattgtagtcaggtagatgttatagattgtgatgtgtgtggaagacctggtggggccaggcaagaggcagatatgctgtagttctaagagagggtttctcgaggagatgagagcctagagtctcttagatgagccatatctgggtgagtaagtcctgagtgagagtcttcaagcaatatatgtatgttttgagaggttgtgcctctatggtatgagaagtgtccagagattgacaattatgatatagtacctctgagagatctctgagagacgtatgtaagagccagtgtagtatatggatgccagaatgatggcatggccctataagacgagttgagatggcttgaaagccaatatgaggtgtgagacctctggtagtaatagcatacagttgagtacccatagagttgggaaatgagtgatagccaggaccatgtcctaggcttattatgttgtatatctgtgtgtatgtttggggttagctagggtgagggaggattcttccagaaccctgagcttactgagatgtttatctcacccctattatgggttgtggttttcaggtgtttccagaggagaggagatacctcagggcaggaggccctaactgatagtgctggagatggtcatgggctgcagatgaagatttgaagagttttggttttgatctctatcttgtatgataaagtacagggtgtgagtgtacacccgttgtactgtacatataatgatgtatgaccagatgtggtcttttttgagcatgtatatttacagttgatgatgatgatgtataagagtgtgtttctcctgattctatatgtatagttatatatatacatctgcctatgtttagtttaggttatgtcgagttttatatggatcagcaggggtttgatgatgttttcatgtgatgtgttttatattccatgtataatgatatcgagaaaaagattctatcgctttcgcaccgcgcatagttaacgctgttagcgtaatactggtattgttggtgataacgcaccgagtgcacatggggtgttacaccataaatgccttatgtgcacaaaacaaacaaaataaagccccttaaagaagccttccatgtgcacataaccatttaatgaaggaatctttcttcttgcttagtaagcatgcatttaatgcataaaattaaaatatctttaggttatgattacttagttactttagaaccaaaccaaggactaactaagttacatcctaactaatttctttacttcctaaccaaaatgttttctataaataccccattgaattaaaattctgcacaagccatgctattcccctgaaacatacggccaattgcattttctctcttcactttgctttctcacttccttcttgatatagaaaccatagtccttcattttcattggatcatcaggttatctctctctattaactgttgttgtaaattccttttttaattcttgattgtttgtaacttttgtaaagggttctttaagctttttctagagtgggtttctctagtgggaagagtagagaagggttctctatgtcttgatcattaggaatctaatatgattttagatttatgttctttatctaggtttgataaagagtgattgttgtaaagcttgtaaaaactgaaatttgataatagtggaactctaatctagtgttgattagaagaactggatgtagcttctcttgagaagtgaaccagtataaattcttgtgctattttttattccttaatctcttcttgctatcttgatatgtggttcttggtgatatctacattactcaactagttctgttttaagcaattatttttttgggctgagtgatttgattgatttgaagcatttttgtttcaattgtgattaagatcctataactctgattttctaaagtattttaaaaggccaattttaaaccaattcacccccctcttggttattgtgtgtattcatattgtttgcatttatctgtaatcgattactaagaacttttgtgaaatggaaaaactctgtgttaatcaattgcatgatgaactagttgattactttgttcatacatcttttccagaaggctcaagaacaaattaattgattaaataaacaattaattgattacttaaaagtaaataatcgattacatggacgtattaatcgattacattcagttacatcagtttttctatataaagttgttaagtcttttgaaagattcaattcattacaatttcgagattttcactaacattcaaaaggcttctaaactaagagaaaaatacactaagtaacaaagctcttgtcctataattcaagattctcatgaatcattggtagaattctctttggacaagatttaaaaggagtttcttggagagcttggtctgaaacttgctttctttcaacctaatcattgattggtaaacatttgcatttgcattccttggatcataaggttgtatctctcctctaaactctagttttaattcttttttttacattttagcttgttagtggctattgcaaaatgattccttaagcttttctagaatatgattatctagaaggaagaataaagaagggttctttatgtcttgatcattagaagtctaataggtgtttagatttcagttctttatctaggatttataaagggtgatctttgtaagcttgtaaagaacaatttttgttgatagtggaactctaatcatagttttggttagaagaaactggatgtagcttctcttttgaagggtgaaccagtataagttcttgtgttgattactttctttattttcttcttgttatcttaatctgagactatttggtgaaatctttattactcaacaagtagaagtttctgtgattattttcttgagctgactggtttgattgattgaagcattcttggttttaagcatgatacgatcttataactctaatttttacaaaattttaaaaggccaagttttaaccaattcaccccactcttagttaattgtgtgtgttcatattgttttcaaattgcatatgaaaatacggtaaatttgacatttatcatttcttcttatggatgcatctgaacttggaatgtccagatttaccacaaaagtcaagtttgtctgaaacaaactatgacttggaggaagttgttcccttttcaaaactcaggctagacttatcatgggatgttgtttgaatttcaaagcagtggtgagaatctttgaactttccaaagtcattagtaagacatgctacttcttcccttagtttttcaacaatggaagtttcattagtcttactagccaggctcagactcttttctagagtttcgatcttttttccaaattctcatttgatttctttaatttagtgttttcaaaagcataatatttgaatttttctttaaacttattccacttaagataaatcataagacaattctgaagaagaacatcatacgacatatccttttcatcgtctgatgaagcacaagaagaggtatcagattcaaaataaatttttacctcaacttatcatttgtatctatcatgagacagatgttggcatgttcatcatctgaactattgcttttatcattgtctgagtcatcccaagtgaccatcaaacttttattcttctttttttccagaatatctcttctactttagctggggacattaagccttcatgtgtccaggctttctacactcaaagcagatgatcacattgctttcctccttatttttctttttgaatatggaatttttatgtcttgaggaatgttgaaactttcccttcttcttcatcatctatttgaacttcgtagacataagggtcacttcatcatctgtggatccattagagttgtctgatccattagattcctacatctgcactttcacagctttagaaaagcttttcttttcttctcttctaaagcatgtctcttcagacttaagggcagcaaaattcttcttttgtagatgttccttattttaaaggtgaacttcatgaactctcaatatgcacaagaactcatcccatgcaacatttttcaaatctcctgcttcctggatggttgtggtcttgggctcccaaaccttgggaaagttgtccaacaccttcaagtttatttgagctttggagtacgtatgtccaagagcttccaaattttttagaagaacttgaagtcttccaaacatgttatcatcagactcttcattcttcctgatgaagtcatgtgttgcaaacacatgctagttttagggtagttttaggttatattttattaaaatacttaggaaaatagttagaattagttaaagtttatcatgttattgtttttaatcttatttcaataccaattaagtaatttcaggccaaaaaaagaggaattcaaagcaaagaaaagaggacaataagaaatcaagtcccgcgcggatcgcgcggaaatccacgcgatcagcgtgaagaagccgcaagcacagcgccaacagcacgagaagccgcgccatcagcgccatgaacacaagccaagccaattgattcgaccaagccacgcggatcgcgtccaatccacgcgaatagcgcgggaagccctgcatcaagcctgaagatttgaataactcgtgcggattgcgcctaggccgcgctaccagcgccacaggagaccagaactagccaattgccttgaacactacacgctaaccgcgtggagcttgcgctattagcgccaaactttcgaaaggtcagcgcgaatagcgcggatcgcgcgcgggtcgcgccatgttgattctgttgccttatttaaaagatttattttgaattttagcaaaggcataggcttagttactgtaattaaatgattctataaatattaagccctgaactgagtcaaagaggaccttggtagccatcattagccagaatgcacattcatccattcttcatcctctaaaccctaggaatcaagcaccaagctgagtttctgcacaataatgaatcataccacagctttgatgttcttgaggcctatggctggctaacttctatattgtgggaaggccatgaactgatgagaattcctctgtaatttgactggtattgaataatatgttttgattgttttattcttttttgttcttaatttctattcttaattgaatttgatcgcttcgattaagtatttagagttaggattcgcaatgggaacgttggggttctaatgtctgacttgttaagaataacatttattcatcacctaggaatagggatgcgtgagtgcagatttcataatatgacctttaaatgcttaaactgatagatttcactaaggaattaggttttcgattcaggttaaagggttaattcactaaggaattagggattaactaatataggaaaggcttattttctgaacaatcataacaggaacccacatgatatagtctttaattgcttattttgacagaatcgctaaaggtttagggttctcgatcgaattgaagagtgaaatcgctagttatctaggatttgcgaatataggagagatttatcatgtatgcacattaagttaacaaaacagtcaagtgaaagaggaggactcagaagggattgtgtctgaccacaattatcattccattggtaactttacaattaatttactgcattattttctgttaattttgttttcacacaaccgatcaatcaaacaaactttcttgcgtaattttctgttttactttcaatcacattcgttagcattactgtgaaattaccccaatccctgtggagaacgatactctacttacctaatctttattacttgcaaacgatcgatgcacttgccgtataaatcgtccatcatgaagctttcataatgtctggtcaaagtcacaacttagtccaatgccttcatagtttatgctcaatgaatcctagattcttttagcagtgtctgcaaatcttgttgtactcattttttgatagggcacatgtcaaagtatatctagcttttgtgttgagctccataatggccagatcgccatctgtccattcaacttcaagcttggtaatgggaatattcccattggtgatggtgagccagattcaatactgggtggacttgatgtacatctccatcctttccttccagtaagggtagtcttctctagcgaagcctagtggtcttgtgagatgctccctcagtgatgaactaacattggtttatctaccatctgaatctttttcttctacacactggcaagtgctcaacccttaggctaaggttttgaaaccaaactgtagaagcaaataacacaagaaggaggggtgaattgtgtttttagaaatttaaaacttttcttaagcctgaaaaatatgttaatcgtctaatgaatataaatagattgagacgatgagaaaacaattttctttaaaaaaaacaaaaaaaaagaagtaagatctaaaaacaagaaaacacaaagaatttatattggttcatctcaacctcaagactacatccagttcttggaaaccaccaaaatttcaccaaattatcaaagttataagtactgttcactgtcatttctcactcttacacttgcaagcgttaccctaagcttgacttaaacccagtattcttggtaatacgaagtcattgttgactctaaacaaatcaaatagatttgttggaaggttgcatatagactaaaaagtatgatcatcttatagacggatatatcacttagcacttttagtcttttctcttaaggtatacatggtgttttgaaagctttgtatctttataagaatttacataaagctttacaaaaaagaatgatgcacgtacgtacttattctcttgtttcttcaaagattattgtatataaatattcatctccaagtatctattgtctctcaatggttgcattcttcattattttcttcgtttgatgtcttgagtccattggaacatttaatgcttgcattaaatgcacgtcctttcttcatgcaaagaccatgttgatagaataacatgtcttgtattttagcatgaaagtaatttctttcatcataacaggtttgcaatgataaagtgcaccttttgatgagaatcaatatgtcttctagactgtgggcttcatttattcttcataatattttttttatcctaggagaatgttttatgcataaaaactcatacatagagtattaaatgaaggtcataaatacactacttaaatgttatattagatcgtcttataagtgtatcatctgaaaacttcaaacgcatagagacagatcataatctgatagcatatcagacacaatttttagcatttttatttatttgcatctaatcaaaataataagagaatcctaattaatctttaagacataaatattttttgacttaacaactaatttgactattttatatcttcaacttataatattatgttcttaacaaggagacatagaatttaatatacaaataataataataataataataataataataataatagagttttaaaacatataataaaattttaaattactaatttaatctcaatcattctttttcaaaagggagtttacaaaaaaaaattgaaagtttaaacaatgtattaattaaactagtagtagcaataactaattaggacaattatttttatttaaaatttaaatacaaatataataatatatttaaataaaggtttaaaatctagttatcaatataggaaaattttaagctaggtaaattttaataaacaaccttttttttcgagcatgtgtccaaatttaggtgttttgttatcagtttccttctaacctttttcactttctcgtttttcaccaaactctttctctttctttattttttcaattttgtttcttttacatttttgtttcttagcttttatttcttagcttttttatatttctcttttttttttctttttatgtttttggtgtttttcttttctctttttattttgcattttcttctttttttcattctttttaattattattttttgcttttttatgatttctttttctttgtatttacatttataccactgtaggctctataatgattttttaataattttttcagtaaattctctctcattttttgtaaaaatttatgctttttcctttctttttttttttgtttttccaatttttcgtttctttatatttatatttatacgaatgtaagcattatagtgcttcatttcttagtaaagaaaataaaaatctctcttattttatgtaaatatttattttttattattttttccttctttctatttacatttataagattgtaagtattatagtgttcattttttaataaagaaaataaaaaatctcactcattatttctactatcatcttctatcaatataagaaacttttaggttacgtaaattacaattttttaacatgtgtccaaattttggttttattttatcatttttctctcaactgttttctctttgtttcttttcatccaattctttctgtttcgtattttcaattttctttcgtttacatttttattcttctttgatttttttaaatttcttcttcttatgtttgttttcttttttgtgtgtttttctttttaccttttttcattcttttctttcttttttctttgtttttatatttttttccttctatgtatttacatttatacaactgtaagtattatagtgtttcatttcttaataaagaaaataaaaaatctctttcattatttataaatattatgtttttttatgattcgtttccttctttgtatttatatttatacgaccgtaagcgttttagtgcttcacttcttaataaagaaaataaaaaatcacattatttgtaaatatattattatatgtacattaaaaggtttatttatgatgttttgcttataataatatgtggagactcaaatatttaagcctaattttaatatatatttttcatttaatttttaaattatatatataaatgattgtgttagataggaatacaacagggacaaagtaaatgtttatatttgtttaacatttaaattgcataaatgtttataattttaaatgggtataaaaatccacaaatttatataaaaagttagaaaccaattttgtattaattaaaagtataaataatttttttaagaaaattattatattttacgatatactatatatttttaaaaatagttagtttcttattataaattatagatgattctaatgtttagatactttaatgatataatatatattttatcaaataattagacatcgttatagttgaacttttaattacatttttcattatttcttaaaatttaatcaaatatttaatatttataaaatgacatatttatcaatttaaattaaattatgaaatcatgataccaatttttttaaaaaattatctttctatttcaattataaaaatagatgttaaacaatttgttcactaatttaataatttgtttactattgatcagaatcctactcaaaataataaacaacaatacttaatacagtaccaagggataaaaaaaataccactattatgcacagaaattatagttgtgaaacttggttagatcattgatttggtcaagatagtgagttagtgatccaactggtgggtcaataattgacctggtttaacttagtatatattaaaaattcaaaattatatatatatatatatatattatataagtatataactaacattatttaagtaagaaaaatctattcatactccaaaatccaaattaaaaaaatcaattttttttcaaaaataaataaaaataaaccaaccgggttagactagtctaactgggaacccaaccggatttgatcaggtcaacccgagtcaactgcatatccagtccgaactagtttttataaaagtgacaggaatatatatatttatcatttttgtaataatttgaattttattttataaaactgttttattatttttattattatagtaaaaatttcttattatattcatttttataattttagctttctattatttagagcttacattattatttctactatttttgtcatataaataaaatttctattattatattatttgtttattaatactttttaatataattttatttatctcaatcttaattcaattatatatattttttttgttccaattttacacatgtcagcatttgaggaaattttttcaagaaaattaataaaataaaattttaatgttctaaatcattatacaataaatttttagagcatacaaagtaatttgctatatttttagaacataaaaaactactatatataaatttaaataatatctcatatactaaaatattatagtgaaacaattattttgtaaatttatggaatttcttgaaaattaacatatataggaattaattgaatagtttaatataaaatcttaaggaataaaatatctaaaaatttaaatataatatttttaatttagacattaataattttgtagaaataaattctaaattatttttttgtcaatgatttagaaatttgggatgtaatttgttttttaatcatttataagaattaaagtatttcataagatgtgatattgaggtttaaaaaagaaaaaattattcattctgagttaaatttagtatttttatcaattaaagtatttaataagatttgttttggggttgtcacattttgtgaatacttaattttatgtttaatgaatatgttttacctttttaagaaaatataaattgtaattgaaaattataagttatattaataaatttttatattttatttaatatttattatatattattaatcggattaatccaattttcatccatttgatccataaggttaaatgaattgtaaaaaaaaaaaaaaaactcttttaatcatattgacttttttttagtttattctgactctaattgcaggttgattggatcgatccattgaatcaaatccattttatcagtctacacagtgctcactgactagtttaatttaaagtaaattatagtaaaatttgttatttttaatatttttttaaaaaatattgctagaattccatgtaacatcatcattactctttgcacatcattcttaatcacacaaattgattttccaacttacgctttcaaactcattttattttaccatcatcaaaactgaacacacacatcacaggtagaatcctttcagtttccaaaggatcacaaagatatgtgtgtctgctccactttcatgtatcatattcatatgcttttagaccattatttattcaaatgttagacttttggcaccccccacttacttagttcccagaacttaactttgctgctgacccatgtggacaactagttcctgtctttgcttctttcattcctaaataatccgtcatagcgaccatcaattccatcttcaccaactccttccaaaaatgagcaaagtgtgaccttttttaattattattattattttgccacctttttcctcacaacacattctattctgttattattcatagcaattaacattttgaacctcaaggctcatcaatcccttgtaatctttcaattttcgaagttcttgattttccgcatcttctcatggccaccaacctcaacatgctcctcaagttcctgtctttgttggtgttccttctgatcccagtttcatctcagcaaaaccagcttttctatgctggattcaagggtttgggaagcaacaacatgacccttgatggggtagcagaaatagagccaaatggggtactgaaactcacaaatgattcaagtaaagtgatgggtcatgctttttatccaaccccttttacgttcaagaactctagtggtggtggtaataaagctttctccttttcttcaacttttgctttggctattgttcctgagtttccaaagctaggagggcatggccttgcctttgcaattgcaccttctaaggatctgaaggctcatccaagccagtatcttggtcttcttgactcaactggcatagggaacttctccaaccacctctttgctgttgagtttgacacagccaaagattttgagtttggagatatagatgataaccatgttggaattgacatcaatagcttggcctccaatgcttctgcatctgcaggttactacattggagatgaggattcaaccaaacagaatctcaccctccaaagtggggtacctattctagcttgggttgattatgatgctgctcaaagtgtggtccatgtcacaatttctgcatcttctaccaaaccaaaaaggccactcttgtcctatcatgtggatctttcaccaatctttgaggatttaatgtatgttgggttctctgcatcaacagggttgcttgctagctcccattacatcttgggttggagcttcaagatcaatgggccagctctaccccttgatctctcttctctcccacagcttccaggaccaaagaagaaacacacatctctgataattggggtttcagcctctgttgttgttcttgcattgtgtgctgtcttatttggcatctacacgtacagaaggtacaagaatgctgatgttatagaagcctgggagcttgagattgggccacataggtactcctaccaagaactcaagaaagcaacaaaagggttcaaggataaagagctgcttggacaaggtgggtttggtagtgtttacaaaggaacattgccaaattccaatacccaagttgctgttaagagaatttcacatgactccaaccaaggtcttagggaatttgtgtcagaaatagccagcataggccggcttcgccaccgaaatttggttcagctgctggggtggtgtcgccgccgtggtgacctcctccttgtgtatgacttcatggaaaatgggagcttagacaagtacttgtttgatgagccagaaatagtcttaagttgggagcaaaggtttaaggtcatcaaggatgttgcttcagcccttttgtatcttcacgagggctatgagcaggtggtgatacatagagatgtgaaggctagcaatgtgcttctagatggtgaactcaatggaagattaggagattttggattagcaaggttgtatgaacatgggactaacccaagtaccacaagggtggttggaaccttgggctatttggcacctgaggtgcctaggacagggaaggcaactcctagctccgatgtttttgcatttggtgcacttttactagaggtggcatgtggactcagaccacttgagccaaaggcaatgccggaagatatggttttggttgattgtgtttggaataaattcaaacaagggagcatactcgatacggtagaccctaaactaaatggtgtttttaatgaaagagagatgctcatggtgttgaaattggggcttctatgttcaaatggttcacctactgccaggcctagcatgagacaggtggtgaggtttttggaaggagaagttggcgtgccagatgagttgagaaagccaggagagggaggttaccaggagggttttgatgaattcttgcactcacttgaatcttcttcatttgatcagatgagcacaggttcatatggtagaactagagacatggattctagtattccttctttaactgatacatctctttttagtccccatggtaaaggacaaacaatgtgattatctacattttactttgagttctactcaattatgtacttaagatatttgtttattttatcatcccatgatgtcttataattgtaaacagaaagttcttgatgatgagttaaatcccaatacaggaagtttgtattctaattatgccccccattggcattcatttttttgattcattcatataatgtaacctcccccatcattttgtacaactttgcttctgtattttgttgttgtgcctgattgatgaaacaagtagctttcaagtgtattagagatacatgagttgagttagctagttagttagaggttgattagtctgttagttaattagttacagactggttagcttattagtatgtagattttcatttgtatacacttttttctcattccaataaatacaatttcagatttctttctaatcattttctccttccatgagctctgccatctgtcataacaaaggactctcaattctaaaattttgtataattggacttgaaagttgaaatgcatatgaccccagatagagcatattgatgacatttttttcccctcttgaacattactaaggtgttttctgaagttgagagaacaaagaatccaaacctcttagttgagacagccttcaattatcttataagagctatatctaggaacaaattttatcttgttctgctctggtgtaaccacaagcattcatgctgaaataattgaaaggcggattttggctcttcaatttgttgttattgtcatccattactgaaatccttcaactttgtaattttataccaaccttggtcctgaactctggtttcgctgtattttcagaaatggtttattttattgttttgaaaaaactaaaataattaatgaagttttcaaatttaaaatgaaacaaacataaaagcttatgtgctaaaatttcgtcattttctaacaataggtattttaacccagctcaatcttgttgcataactaagattagttaactttaaacaactacgtgttagatgattcgcacacttaataatgttagtcctatggtctaatatgatttatccctttccctaatgtaaacatcgactattatatgaaataagtgaagtttaaattcttttaacaaatcttatcttaagttatcataaaaaatatatatctaagtagactatgtttaggccattagaaaggtatctagctagctagctacttacatacaataaaaaaattatagtatttacattactaattatatattaatataataaaaattatactaacctcatccttttatagataaaaaagttgttttccaattcgaacctataataaataagtcactaagatacaattttactattatgtcatgacttgtcctcaattatatatattaatataatatatttattttatacacaatgtaatgataagtttaattttgattcactgtcggaagtgtaaccagattttacagttttaacaggtgatgggttactacactatttaataagcttaacagcgtgaagatttatattagtcgtcaaactctttaaataataatggtaacctcaaatgtataagtttatacctatcactatcattagaaacctaaaacaaaatttacttttgaacccatttgaaagcttttagtaatgagcgtcaagcttttatggttcacgagaaagttcatccatgtataactaccatgtttacggtatgatttggttcaattttttatcaaaacattattcaaatcaaactttaaaaagatctaccatttgatttagtttgatttttatttaaaataaaactcaaatcaaatcacaccaatattttataatttgattcagttcaatttttatggtttttattaaaatattatttcattaaaatttatataatttattttcatattttaaataaaattaaattaaaaattgttaataataatttataaaatttattaatatgttaaattttctaaaataaaaatttagaaattttcatttattttaaacaaaacatatcttacaacagtcgtatgaaaaagaaaataatatttcttatataagtttcgtatatataatactgtaaaatattgtaaaactcaaatatatacacatacaattcataacattaaagtaataaaagtgttaatataaatgttatattttgattcggtttgaaaatcacaaattgttaaagaaaaaaaatcatccaaacaaattaaaagaaaatcagtttgatttgatttttagttttttttttttttgtgattttagatttttattttgaaccactttagatttaaacactcttgtgtgtaacccaattagggggcgggggccatgggaaggacataaagattaaataacaagataagtcgagtaatgtctcgtcattgataaataaatacgtaatggattaggaatttaataataagaccgttatatttaaatttttttatatagattacttatatttagaatttaatgtatatattagaagatcgtacacttttctaataactgttttagaagtcacatttaaaataattttaattagttgataatgtaaaaaaaaaagttagcacaacgcggtttaatactttctttccaatttagcaatcgttcaattattttcaaaccaaaaaaaaaaaaaaatcagaaattttcaatactgacgggcaaagattgaatttaaagcacccaaaacttcagaaaaaggtatgaccaatatgtcaaaaaaataataccgaagacttaaagtaaagaccattcatttgcgtttaccaaagcccttttcaagtcaaacaagcaagacttcaatgaagtatgaaatgcctgaaaatattcaagttatcttacactttccaaggaaagaagagttaagaaggaagaccttttttataaggataaaatgtctttttataagttagtgctcaaactttaaaaaaatatataaatttaggctatcctcactaagaattcatatttgttaaaatttgactagatccatacgttttttttttaaattcaaagatcaattttattaatataatagtacaaaaagtttaattatatttgatttttttttatctataagaatcaaagttaatactatgatttccagcacttatatactttgttaaattaattgagctagacccattaataattatatttgatttttttatttatgagaattaaagataatattaaaaaaactataataactcatattttactcaactacgttaaaattttgattgaaaatagattttgaaaacatatttttcccttcgaagttacctttttcctgtttgttagtattgttgccaccattcatggaggtcacattaatatttggatgtcatcgcccattacgaatttgccaaccccttttaatttgattagttaaagagttggttacagcacactttcttgatgcatactcacataaattattattgtaattgatgtggctcactgtccagcatgattgctttgaaaagattaaaggtggataaccaccgaggagaataattttttcaatacaaaacagaaaggaaacaaaaatactaaatagataaattgatggatggttatagaagattccataattttatgtcagatttgtatttaaaaatccatacaccattcaattgagctgacaagaattctcataatagtggtcattgtgccactattttgaaaaaaaaaatactccaaataccatgtccatagtggtatttctcaaagtgtcatatggcatattttgctaactttggatgcgaaatagggaagctaaggtggcgtcgtccggttggtcacataattcgttacagggaccagcgaattatgtggtcataatggcagtgcctaggcaaaattggggcaggacacatgttaggcttgggctagttcactgaggtgtctagcaaattacgtgtcaccatgacacatggcagctccctattaaatcgctgaggggcacagcgaaataggtggcatattttgctagatgacacaacgaatttagtcttatataacccccccccccccctccatttttacatcaccacacatgttctgttaaaagctttgttatttttcagttcaacacacgttctcgtaaatgctctcttattttttagtttaatttctgcaaaatgagtggcaatagaaatggtttaatcaccattgtatattataatgacaataaatattttggacccaatggtcaagtctttgaaggagaaagtaaaatgtttcatatgcccctagaatgccactgtgatctgatgaaaatgatttacaagaagttgagattataacgcggtcaatctgtgtatcgattgactgctagatgtgcatcgggcaacccggtgtagtgagttgttgtggatattgtagatgatgacaatgtagcgttagttacagacgcgtgcacatccaacggaggagaccccaaatttattgaattgtatgcggaattaaactgtggtggacaatcaagcagtcaatattttgtctaacccattggctccattggcattaacagagagccactggtgaatcctgaagacagagatgtatccccatcaccaccaccaccaacccaaccaacctaacaaatggattctgaagatagggatatatcgcccctaccactaccaccaagtcaagcaatggagactaaaatggtgtcggcccacgacccagcttggcctatggacagttctgaggacgagatggacgaaggtcttgttccagacagtgactcatcgaatacggacgtagatggtgatatcaatcgtgtttttccaattccttcttcgggcattgtcggaatgcaagacccgcctctagttccgggtatggatacacattattttgtcaaacactagtgttaaaattattgcaagtttaatagaacaatgtgttgaatgtctcattatataggagaggacaacgttccgttttggtctgacataagtcattacacgaatattaattgggcatacccagatcaggagtctgatgacatgcaaggagtgtgaatacctaattggcatatgggtcaacagctatataaggaccagctgtttgagagcaagcaagatgttcaattggcaataaaacaataatgtatggccgagcatcgcacaaccatagtagaaaaaagtgatacgaaaaggcttataatggtttgtgaaaataattatgatggttgtccatggaggatgagggcatactaaaaaaatggtggcactgaatgggttgtaggcatatgaaacaaccaacacacatttgctagtcagaatctttctcaagatcacaagcagcttgactcaaatttcatttgttcgttgatcttaggtacttaaaataccttaaattgaactccaaattttgttgaaaaatgtattaatgtgttattgtttgatgaaatgcataaatgattaggtaggaccccagtgttaaaattgggttaactcagtaaagaatatcaacaattctcgaatttcatatatcatacaagaaggcatggaaggcaaagcaaaagactatttgaaggtttttgggaattgggatgagtcctatgcattcctgccaaggtggttgggttacatgttaaatttttctcctgggtttgcctacaagctggatttgaacgaccattttattgatggacaactcgatggaagtgctaaggtgttcaagagggtgttttggacatttaaacagtgttgtgatgctttcaattattgcaaaccagttataagcatcgacaaaacccatttgtatgggaaatactggggaacattactcattgcaacatcagttgacgacaacaattatgtccttccaattgcattttcgattgtttctggggagaatatcaacaactggttgtgtttttggcactaattcggatacacattacgcaaaaagagagaattcgtcttatttcagatcggcatgcgggcatactcgtcgcagtgaacaatgtcgaactgggatgacaactacccaggacataccatgtttattgcattcgtcatttggcgagtaattttaatcacaagttcaacaatgtcatgttaaagaaacaattgaagaaattaggtatgtctgcctatacgacaatgttattacattgacttactccattgatcttatgtcctgatttttactttgtgtttttatatgcagcttatacaacctcgcgcttagatttcgatgccggattagaaacatttaaagaatcaagccctcaaatagccacatggattgataaaataccaaaggagaagtggagtatagcttatgatgacttgggaagaaggtttggtcacatgacaaccaatcttttagagtattttaacaaggtatttaaaggatttagaagccttcctattacgtcccttgtgcggttcacatacgcttaactagtagcatattttgtcgaacatggttaagaggcccatgaggaatgacgaaaggtaatcatttctccaaattagcatggcaaaaatatatgacgatggttgataaatccgcaacacattatgtcacttgttatgacacacttaagacaagatttgaggttcaagagacgtacaacatacgggctcataggggaggtaagaaatggtcggtctcgttaggtgaacgaaattgtcaatgtggtgagttcactaccttcaggttcccatgtagtcatgttattgcagcatgtcgatccacacaccacgatcccagacaatatgtagaccctatatatagtgtcacgtattaatgtcaagtgtattcaccgcagtggtttccaattggaaatgaggaccgctggaccacccatcgttatactagatgtgtcattgagacctaaaaaaggaaggccaaagagtacacgcatacgcaatgagatggattctcgtaaagggtcgacaactcgcacaaaatgtggttattggtcacaataggcataactgcccttcacgcagctaggaccagtgatgtactacgtgcttatagttatgacctatgttttcattaattaataaacagataatatccaaaataagtgaagtttattgtcttgcataatacatcaaattaaaatatgtggatatagtccaccatagtcatgcgtaaaacatcaaattaaaatacaattaaaattcaatcatagttctcagtaatttatcaaaaaaaaaaaaaaatcagtcatcatttccatggtctatatgatatcttccacaacagctcatgttatgctcgtttagtgacagatgacatcgaaatcgcgctaccctaaccggatttcgcctaatgatgcggtcagggtcatcatcaccatggtcttcgttgtctttatgtccccctccgaaactgggagaatgtattaagtgagccgaatgtgtcataggagtggccataaccggatcctgctctgatgtcgaagtagtggggctataacagtttgcaaatgtgtccgatccaggtgtgaactggaacccagctgaactggggccagctgcatacatgggatattggaatccggactgtggcatcgatggtgctggactagatccggttactggttaacgacaatctcataacaaataagaggacaaacagtcaaccatctccgaaccatgtcaacctccgatggatggactatgtctacaaggtcataaggcctccaacatatgtctctcctgcgcatgacatcaatataatgccgatatctgcgaatgtgtgtatatacggtttgtcaagtatcgtatacactaaacctacaacaacaaaattactgcattaccaacatataatctcaatacaactataatgaccctcagttccggcgcgactggtgtgaggtttagcgttggtggcgttgaggttctgcagaaaaaccagtgcagaggtgtggcgcgatcagcgccgcagcctctgaagcgtggcgcgcatggcgccactgtggcgcgagtggcgccatgagttctggagtttggcgccaagagcgccagggtggcgcgagaggcactatatcacccagagaatctgacctcccctgaagcatggcgcgagtggcgccaggttgacgctggtagcgccacatgttctggatattggcgctgatggtgcggcagtggcgcggatggcgccattgtttttggatgttggcgctgatggcgtggaagtggcgcggatggcgtggcaagtcggtcaggcccaatatataaggggcagattacgaaatttcgggcaaaaactcactctcttcttctctgaacgcctgaacctccattgttgaagctccaagcttcatctttgcaccttagttcacctatatactttcctttcatcaccaaaactgatggaaacctttagtaagctagaatccttcatcagaaatccttagaaccccttaatcagagaagtcccttcctcaagggaaagtagtatagctcgaatttgtcgaggaatggtagtgagtaacgaacatctgggccaaaggaagtggtctagaggccttcctcaccaatattgaggtaagaaactcgagttcctctggttgatttgtgatttggggatttttgggtgaatagtgacccacttgagccgggctagaattagccatgggtcctgtagaaaagagtgatgaaggattagctctcagatgttggattggtgaactttggttttggctctatgattatgtatgtgtgacttgtgtcgagtcacttgttgatgttgggacatgctagagccttgttgatgggttagatttgcctgagaggccatgtgaacggtgtcatgtgtatgatatggaccgttcaagccctatgtgatttcttgagttgtgaggttgtatagagcttaggcctccctgtgtctgacttggcttgagtctgcggtgactctgatgtcttgattaggctgagatagactactgagggtctatgagatgcctagtgagagctgggctatgatgaaacttaagttagaagacagagattgatatgaaaatgaagagtgtttcctttcatataaacggttgaaaatcgttactgattgttaattgcatgcctattgtagggcgtgagactcatatcactggtggtggttaccacgaggctaggaaagctggttctgagctgagatcaggtaagctcgtcgttcttggggaatgtttcccttacttgcgttcaccacacccaagagggtgatggtctagtatgccatgcctctgaattgtatgatgtgttagattgagacatgtatgtgatggcatgatgatgattgattatagctagacactatgatggtgtgatgctctgtattggttatgataatgatgtgtgatgtggttatatgagaattctctggccaatagaacaaggaactatggaccccttgggaatgtgcccttaagtggatgagcttccttgggacaatccataggtgtccatgtaatccctgagagaatgtgcccttcattggatgatctttctcaggtattgggcgggaaaagtcctaagggaatgtgcctttaattagatgatcttcctcaggcatggatagggagagtcctgagtaaatgtgcctttcagtagatgatcttactcaagtactcaaggagaagtcctgagagaatgtgcccttcgatggataatctctcaggcaatgtgtgttggctgtatgtggttatcctgtgctgtgatgtgcatgcagtttgttcctatgagccgtgaaggctgactgtaggagtaatgcttaattaatattattcatgttatgttatatttatatgcttggaagtgaaccagggggagggaaacctccaagaaccctgagtttactgatattattatctcacccctgttggggctcatgttgcaggtgatgatacaggagaggctgatagatcccaaggcaaaaggcctgaacatggatagtactgttgataaccctaggcatagatgactgagcatgttggctcgcattttgtttattatgcctgtattttgtgccctaaggggataattgtatagttttgtgactcattcaaaggattatgttgtatatgacagaattcaccatatatgtatacaatgtacttttgatatttgcttcggcttcttaagttttattttgaatgtattgtaaccgctgcattattctgatatgataataatgttaatacaccgggtgcacacggggtgttacaacaaccaaaccatgaaataataacagaaaaaacaatacctgtgtgcacatatctcgcgctctatgacatcctgatcttccaccctgggaaggttaggagagatggtcgagaatcacgtctaagcccacaactgcaacaacaaagcacatccacccaactacaacaacatgcacgtgttgccttacacaactccctatacaagactgcaagaaccgcatagccccaactgaatgtgcatgtgcgatggaaatcatccagatataacaagtatcaagcggacacaaagctcgatgcgataaaaaaaaaggtttgaattgcataataacacgacatgtgatagttagtcattttattgttattttcacgagaatacacaatatccaccttttactatgaaaggaaattaagaaaaaagtatgagtaacttatatttctttctcgaaaattgtaagagcaacttatatatccaccttctaagaattaactataaatatttttttcaaaaattgtacaaaacataatgagattcctaaagctcactttctcgaaaatctttcttgacacctcaaaattgcaacctcaatgatatcttttcacatgcatgaattccaaaatccaatccaagactaaggaggtgcaaggttaaaatgaattcaaaacataccaaataattcagttcccttatttgcacacctgaaatggtttccaaaagattcaatcacaactaaagtagtttggttactggcttgggctaggggtggtgctactagacatattgttataacttatagccaaggaaactagctaaaaattaacaaacagtaaggcaggaaaaaatgacaaactggatataagacatttagaaatgatttatcattttttctgaagttctaattctcaagtgaaccaaatagacacaagaaattcattgttataaagagatgcttataacaataagatcaatgacaacaacataatagacacaacaaattcattaacttaaacacggttaaactattgaaagaaaatttggataagatagaccccctatcagtaaatgagttaaagcacttgatatagaaccatctttaaaccactgttcccagtctccatttcattcttcaatgtaatcagtaaactgtacagtgagcgtgcaaaatcaacgatagcccttggttcatatgatcctcatctacattgtcaaagcagcctttgccatggccaaggcgccgtcaaagtttttgtttccgccaataaatccactcatatgcacaaaaacacatccacgaatgccagactcctttgacaattcttcatcccttaacccttgccactataagggtagagcctttcggctttgaaaactgtcaggagatactgcgactgcctgtactcgccattgtttgcttctttcatcctgtgaataataatgaggtgatttagagaaatcagttaagaaaacctagaccagagatatattgatcaaacaaccttactaaggcatttagccaattctggtcatggtgatctagggactcgagtattttatcagcagagcatttttccagtcaaaatttagcagaacctcaataataaaaatccaacgtaattagaaattggtattttaagtatgtccaaacctctagcccgaataagctacattgaaggccttattacatagttgaacaaaaactatatttgacccactttacatggaataacatcctaccacaatggtaaagttgcattttgatgatcagttggtcatgaattcaaatccgaaaacaacctcctgcatattgatgagaaccaagaaaattcaacggatcgaaagcccagcaatgcactacaaggattgggaggccccatgacaagggcaagatcaaaggaagcatttgatcatgaagtgaactacttcctttttcaaacattggaccaagatatcaaccttgccttgagtccaaagaccaacctagaagaagaggtcagattgctcgaatgttttgaacataacttgagttctagatgtctgtttttaggcattcaaaagctccgaagatttcctaaaagtcatatttctagtcttaagtcctaattctgcatctatgatgatgaaaattggacacgaagttatggacgaaaattactttttgtttagacattttttagtgtaattttgaataaggaatatgtggctgaagtcccacattggaaagaaagaggagagagacaccacttgttggctataaatagtcattcatttatcttatgtagacacatttgaattgaataaaaactttgcactctaaagagttctgcgagaggaagttcctcttgggttcttgattggaccaaactttggttcttatcaaaggtttctataacctttgtggcgaatccccacattcaaataagaagacactaaaaaaaagacaaaatagaaaatgtaacaaagaaagacacttaaataagaaggtcaaacaaagccaatacgaaactagaaaaaaaaaagaataacgttataacaccacaaataaactttcacaattgtcaaatgaatttgtgcaaaggggttctcttatgaagcaatttttttttacaagcagcttaaaagaagcacttctgaacttctcttgtcttttttattttattttaatttcactaccccttttctttttcacactaacgcatatgattttcggttgatgcccaattgtgaacagtaatggttcaattcagaataaggtgcgcagaataatgtctttacaacaataatatgagcataatataatgaagctctaacttgcgcaaaagataaagaatgagaaataaaagaacagaatgataaacttgttgattcaagtgaagccaagcataaatgaacagaagatcaagcttcaaggttttggactttcaaacattctcaaaggaaatgctcaaaggaaagcttgaagaatcaatttgatcaattgtaaaaggaagtatatgatctgataatccaattgtgcacatcatgcattaatcattcatttaggatcattagattaattgattaagtaaaagaaattcattagaaaggcacttaggaagcaaagtttttggaaaaataaagttgcatatttaataatcgattacaagaatagtgacatcgattattttgttcttcgtgccctttagaaaacaaatcatgatcattgtaatcgattacatatcggtttaatcgattactaaggctttttatgcaagatacaactctctgtcttaatcgattacataaaattggtaatcgattacaagcctatacatgcataatagaagaatcacaactcactgtcttaatcgattacatatcgttttaatcgattacaaagctcatttagaaaaacatgtctgactggtttaatcgattacttcacggaataatcgattatattgttcatagcctaaacccagaaactattaggagcattttaatcgattacagtcttgatttaatcgattacaaatgataaataatcgattacaggagcgtgtttaatcaattattttcagttagaaatctattataaattgaacccacttctctgaagtttgtaacttttgataatacgtattctgggctttcacaaacattctgagctttcattagtgagtttctctgagttctaaacacacttagcttcacaaaattcatatgggtttttgattcaagaaggtgaagcctcattcattcaaagcataaggaaaggactgcatatgtgattgtaatctgtctttcaacctgagaatcattcattgtgcattcattcttggattatcaggtgatagctttccttattctttgaaggtgtaatctgttctttgaattttttgtaaagatttgtctattgtaattgagtttcttgcaagtagagatagtgtttctctaaagacagttgagtagtgttctcagtgtgggttttggtctctaaggatctaatagggttttagatctctgaactttatctagggttgatgaagataggcttgtaaaattgcttgtaaggatatttttacaatagtggaactctactctagtgttgagtagaagaactggatgtagcctcatagggtttgaggtgaaccagtataaaaatatgtgactaatctttcttctcacctattcatctcttaattgctttgtttgtgaatcaatttcattgcacagaatattatcctctgttttctattgttcttgaaaagggaagttgattgaatattgattcttggtttttagaacaattttttaagtgataaagatccttggtaaactctgatttttaaaaattttaattggggaagattcaaccaattcaccccccctcttggttgttttgaggtattctattcattttcaattggtatcagaattggttcttgtaagatattcaagatcacttttttcttttcaaaaagaaacatgaatacttcttaaataacctttaaggagggtgcctctttaaacagacctccaacagacctccaatgtttgaaggggaacacttcaatttttggaaaaatagaatgaagatctttattcaatcaaatgacccaagagcatggaatgctattgagaatgatccctttattccaaagaaaactgttgcaaatgagttgattcccaaagaatgggatgagatgactgaggctgaacaaagagtagtccaatatgattttaaagctaaaaatatgatcacttctacactttcctctgatgaatttttcaggactgtgagatgcacaagtgcaaaagaaatgtgggagatgctggaaattactcatgaagaaactgaggaagttagaagatcaaggaagcatgctttgattcatgagtacgaaatgttcaagatgaattccaatgaaagcatctctcaactgcaaactagatttacacacattgtaaatcatctattgggtcttggaaaggtctttgacactgaagagctaaatgtcaaaatattgaagtgcttaacaagaccttggcaaccaaaagttacagcaatcaaggagtccaaggatttgtcaaaaatgtccatggttgcattgtttggtaagcttcttgaatatgaattagaaatatctcaattaacatcttgtgaagatgtagaaaataaaacaagaagcatagccttgaaagctgcaactttgaaagctgaaaaggaagaggaatcaagtaaagaggatgatgaggacaatgtgaacttagtggtcaaaaagttcagcaaatttctgaggaaaaacaagaataagagattcaccaaaggcaacaaaaacagcaacaccaacaacaatctcaacacgaagattgacaacaacttcacatgctttgagtgtggcaaacagggtcacatcaaaactgagtgctcaatttacttgagaaagcaacaaggtgaaagcaagatgaaaaaggaaggaaaaggaaagagggcatacatagcttgggaggacaatgagtcaacatcttcagattcttccacagaaaatgaagaaactaacatgtgtcttacctccaccatcaatgatgatgatgatgatttgctaagtgaggaagaagaggtaaattctgaacttgaccaagctatttatgcttttcaagaaatgtatgaggaagcccaaaaacttgcaagatccaataataagctcaaaggaaatcttagatggcatattgagaaaataactgaattgcaaaataaaatttgcaacttgaaagaataaaatggaaaacttgtttcaagttacaaattgaatggatgtgtgtgtgccacttcttctagcaatgttgataagtataacttgcttcaaaaagattttgataattctaaggattccccccgggaaaaatagagatgtctcctacgttacccgtaccatgtggaagtagcgacgtaatttcatagagtcattcagtctgaatgctacatgaagaacataagccagatgaaggaacgggaagacctaggatgtagaagatcataacatgagtgattcggcagatttggattcctatatacccactcgtgcggtacttcattgtgtgatctatatctatatatctatatctatatatctatctatagatatatagatatataagatccatctgtatagatatcatcatctacatccagaaagccgtatgctttgtaagaagcttgtacagtttgggaagaggttttgattgatcaaaaagaagaatctacttcaaccagagtataaaaagagtcaaggtgaaaaatatatgctgcttttagccaaaaacagtgatttgattgatctcttgagaaagttttataaaggaaaatgcaacttggctgaaatgttaagtgtgcaaaagtatgcaggagatacttctggtttggggtataaacatggagcaaaatcatttggaaaaacagtttttgtacctccaaaacagaagaatcaaaagtggcaaaagaactcaagagtcaacaaatattctggttttgggaaaacttcaaaatctgtcacttgcaactattgtatgaagaatgggcacacatattttaaatgctatgctaggagattctatgtgcctaatggtgattgcatttggattcccaaagtcaaaagaaatgctaacccttatggacccaaccttgagtgggtactttctattaaaatctaatttgcttttgtaggtgtgtctaagagctagtacatcaacttagtatcttgacagtggatgctctagacacatgactggagacatgtcccttctctcaaatttgactttaaaagaaggagtatatgtcacttatggtgataacaacaaagggaagatcattggtgaaggcaatattggagacagcattaaggcaaagatcaaaaatgtgttgtatgtagatggactaaagcacaatttattgagcataagtcagctatgtgataaaggctttaaagttaacttcaacaaggattgctgcataatttcagatgagaaaagtggtgaggtattgcatataggtaaaaggaaaggtaatatatatgtgctttcaattgaccatgcattatttcataaatcttcttgcctaataagtaaagttgatgaaacttggctgtggcatagaagagcaagtcacataaacatgcatcacatgaacaagttcattagaaaggatttagttattgggttacccaaactcaaatttgagaaggacaaactttgtgatgcttgtcaaaaggggaaacaaacaaagaactcttttcaaagcaaaaacattgtttccacctctagaccacttgaactacttcacattgatttgtttggtccttcaagaactatgagtttaggtggcaactattatggacttgtgattgtggatgattactctagatacacttggactttgtttttgaaatccaagagtgatgctttccttgcttttagaaaaatggccaagcttactcaaaatgaaaaaggatgtaaaattgtttcaataagaagtgaccatggtggtgaattccaaaatgaacattttgaaaaattctgtgaggaaaatggaattaaccacaattttttagctccaagaacaccccaacaaaatggtgttgtggagaggaaaaatagatctcttgaggaaggaactagaacacttcttaatgaatcaaatttacctaagtatttttgagctgatgctgtaagcactgtatgttatactttgaatagattacttataaggcctattttaaagaaaaccccttatgagctatacaaaggaagaaagcccaatgtttctcacttaaaagtgtttggcagcaagtgttttgtactgaacaatgggaaagaatcacttggaaaatttgatgctaaggcagatgaagcaattttccttggatattcattgcatagcaaggcatatagagtattcaataaaagaagaatgtgcattgaagaatctgtacatgtaatttgtgatgaaactaatccctctaaggaggaaaaagagttgggtggtgatgcaggtcagctggaagaaataattaaaataggcaatctctcaaccaaaattgaagaaccaagtgctgaaacagaatccacaacccttgtacaaatgcctaaggattggagaacaacaagagacctatcacttgacaacattagaggtgaagtttcaaagggagtatctactagatcctcattaaagaacctatgttgtgatatggcttttgtttctcaaattgagcctaagacaattgatcaagccttgaatgatgaacattggatgcatgccatgcatgaagagctcaaccagtttaagaggaatgaagtttgggaacttgttcctagaccttcatctcttaaacccattggcacaaaatgggttttcagaaataagcttgatgaaagtggaatcatagtaaggaacaaagctagattggtagctaaagtacagaggaatgattggatcattgttgtatttgacagctagcagacctgatataatgcttagtgtatgtttgtgtgctagatatcaagctaatccaaaagaatcacaccttacaactgtcaagagaattctgaaatatctcaaagctactccaaaagttggtctttggtatccaaaaggtgcttctttaaatattattggttattctgattctgattttgcaggttgcaaattagataggaaaatcacaagtggcacttgccatttacttggaagttcattaatctcatggcactgcaagaagcaatcttgtgtggcattatccattgctgaagctgaatacatctcagctgaaagttgttgtgcacaaagcttgtggcttaaacaacaaatgcttgattatggagtggaactgaatgctacacctctgctatgtgacaatacaagtgctataaatatatcaaagaatccaataatgcactcaagaacaaaacatattgagataagacatcatttcctcagagatcaagttcaaaaaggtaacataaaggtagaattcattgacaccaatcattaactagctgatatattcacaaagccactatctagagatagattttatgcacttagaaacatgctagggattcttgatgaaagcaacattatctagcttgattatgtgtgtttctatgtgatgattgaaagcctgaatgtcactaaatgattaagtatgggtatctttgtcaaaaagcttctaaaatgctctgtatctgatattttatctgtagtaatcgattacaccacgggttaatcgattaaattcattaaaaatcaagtctggaacaaaatttgcatacatgtaatcgattacattagaatggtaattgattattcttcacatatccagaaatcacttttctctggaataatcgattacgtatcgggataatcgattacaatgttctaaattcaaaaacttcaagcatgtctctctggagtaatcgattacttattagccgtaatcgattaccattgatattgcaacaatgctcactttgtgataatcgattaccactcgggataatcgattacctatggtcctgatacttagatagttgattcaagctataaaataatcgattatttaaacaaggaattgattacaggtcatcttcaacctctgatcaagagtaaaataatcgattacttatgaaaataatcgattaccacgtgtttgcaggaagcctaattgaattggaataatcgattacattacgaaataatcgattattcatgttgttgtctgaaatctgacaggtttttatggttaattaaactacccaatccgttttaaatctgcacccaatgccattaaactgtcccaatagctataattttaaaacttgtgaacgttaggagcccaatctttgcttataaatagtgatccaaaaggcttggtgcactacacttaaccatttctattcttctgcactttcttcttttctctgtgtctaaagttctgtctaagcctacctgagaaacatgtctgagcctgcttgcaaaagaattaggaaaccaaagaggagacatggtgaatcctcttctcaacctcaacctcaacctcaacctcaacctcaaccataacccattgataggcttgatatctggttctcttctaagacagataaaatcaattacctccaattcaatgctactaagtgatagagtgcttttagttgagtatttttctatccttcttagcttatttgacctatcttggacctttattttcctattctaattcagttttgggcctaagcaagtaagtgggcttaattactaattgttgcatattttcggatttttggctcactagacgtatctgacttgtgcaggacctatagggtgctaccgatctccgaatagagcgttctaggagtccctggacagcacttttacattcaataaaaatagtttttatttttctttcttttagtttttaggatcaaactcttgttctttattttctctcatttgttcttcattgttcttcatcttcttcattttcatcttgctatctttttattttactgcactcatttcatggggctttccatggtgatgatcatgggaggctaaatcatcaatcaatccaaggatccatctcaagcaagagaagaattggagttctggttcgatatttcgaattctacttgaatgtttaccttcttcaatttctattatgttttcatgattatgaatgcatttggggttgaaagtgagttaggattatggattgatgtcctaatttcaaatgataatcacaagattaattgaatgatatttcagttagggttgtggtttcaattaatttaggagtaggatcgattgaactgcttctattgagattgaatgaatgttcatggtagaatcaaattatgggaatgatgatgattcgaatagcttgggttggtgaattggattgatgctctctcatctgttttactttattccttgataatcttgttaatttctgcattgttctttaattttagtttgtgttcttgcatgttttactttgcgtataccaactgttcgacaaaatccccccttattattaccaatgatttgaagctagaaccatattgatcgtgtctctgagtcgacctaggttagctctgtgctacagaattagcttagtaaaattgttttggtgcgtgtcgacaacgtgtttatcaaaactggcgccattgccgggtacacggttcattgtgtgctagctttaattcattgtaattagttcatagaagtagttttaattcttgcatttttacgttttggtgcacaactatgcttgttacatgattatgtgcttgtggttgctgcattagatgtgtctttgcccataaaaacagagaaaaacccataaaaacagagaaaaacccatagaaacagagaaaaaacccaaaaaaacaaagcacagcgtccagttggccctgatcgcgcggctcccacgctgatagcatgaactggcagaacctcccgcgctgatcgcgccagaccggcggtagtcgcgccacaggtttggcaatcccatgctgatcacgccagaccggcgctagtcgcgcgagattcctgagcataccacacggatagcgccaacgtaaaaaaaaattgtttttgtataaactctttaggattgtatttgtgctttttattatcctttatgagttgcattgtgtatgactaggtccacatcaagtgaattccattcatttgatcctgagatagataggacatttcatagattaaatagacaaaaccttaggttagatgactttgatagtgtagttttagatagtagcatagcgtcttttgattttgattttgattctacttccacacatcttgatatcatggctgataacaacctaactcttaaggagttagctacaccagatgttgtttaccaaccctggtgtattcaataccctgagactgaggtcaattatgaattgaaatctggactaatctagttgcttcctaagtttcatggacttgctggtgaggaaccacataaacaccttaaggagtttcatgtggtgtgttccaccatgcgaccacatgatgtccatgaggattatgttaagatgaaggcattccctttctctctggatggtgttgctaaggattggttgtaccttcaaccagatcctatcaccacttggacagtcatgaagagaagatttttggagaaattcttccctacctctagaacagcatccatccggaaggaaatttgtggcataaggcaattccctggagagtctatgtatgagtattgggaaagattcaacaagttgtgtgctacctgtcctcaccatcaaatcagtgagcaattattgattcaatatttttatgaaggattgatgtggatggataggagtatgatagatgcagctagtggaggcactctgatagacaagaccccttttgctgcaaggcagttgatgtgttgcaaacacatcttaattttagcattagttttaggtcataattgtagtaaatagttagaaaatagtataagaattagtcatatttattattttacattataaaagcattttaatatcatgttaagtgtttgcaggccaaaacaaaggaaattaagagcaaataaagaagaaaaccatgactggagactcacgcgcatcgcgccacaactcacacggttcacttggacgtccagaaagcatcacgcgacacgcgccatgtttcacgtgagtcgcgtgacaaactcaaagataaaccatttcagctctgacctcccacgcgacatacgtgagaactcacgtgagtcgcgtgaatacttcaaaggataagcaattcaactctgtgaagccacgcgagccacttcagctatcacgcgcatcgcgccattctctactgccatgtcacgcgagtcgcgtggtgtcgtgcgcgagtcgcgtgactgcgtttttcttgcctgaattaagaagatatttgctacgaaaataagatgaaagcatgacttagttactgtaattaaaatcttcgataaatagagagtttctgagcttttagagggtacggagacacttagacacaattacacacttagaataagagtattattattgaaggcaaaccctaggaatcaagattgaagccaattctgcagaatcatgtttcatccaatcgatttggtgttcttgaagcctatggctagctaatcttcttgttgtggaagggccatgaacttatgagttttccctctgtaaattgactggtattaaatgcatatgttttgtttatttcaattcttttctgtgcttaatcataatcttgtttagaattgatcactctgaatgggtattaagagttatacttcgcaatggacacgttggaattataatatctgacctgttaagattgacacttgttcttcacctagacatagggatgcatgagtgcggaggtataatatgctctttgattacttgaattgactagtttcactaagacattaggttatgaaatcagttcaaagggttaattcactaaggcattaggaattagctacaataggaaagacttattctccgaataaacataacacgaacccataagatttgttctttgacttcttagtttgacagaatcgctataaggttagggttctcgatcgaattaaagggtgaaatcgctagttaatgctcttaagagtctaggatttacgaaattaggaaagacttgtcttatgtaaacttaaagataaaaccatcagtcaattgaaggaggtaacgcttataagggattgtacctgaccacaaccacttctcattggtaatctttcgcttttaatttactgctttgtttaaattcattcttcaattcaacttaatcatccaaattactcttgcgtattttactgttcttgttcaatcacaacttttacaattattgcaaaatctttccaatccctgtggagacgatactctacttacacttttattacttgttaaacgatcggtgcacttgccgtatcaatcgcgttaatcgcgcaacaagtttttggcgccgttaccggggattagtaacagaattttcaataaattaaattttgcgattgaacttttgctactaaccacttctcttgagtttttatgcgaagatcagctaactctgaggaattggaattcgaccctgaaattgaaagaacactccgaaggagactagttagacaaagaagaagagaagcggaattctttgactttgattcaattcctgaatttgagtcggaagagatggctgaagaactacgtaatcagcccccaccaaggctacggcctgaagatgaacttatggaggatattctggctcctatgttcacaagaccaaactccagtattgtgagaccaccaatccaagcaaaccattttgatataaacccttccttgatatcattggtggagcgcagtcagtttggaggagatgattcggaagaccctcatgatttcatagatagattccttagaatctgtgacactattagacaccagggagtttccgatgatgctgtgaggctaagcttattcccgtttgctgtgaaagacaacgctttgagatggttgaactgccaaacctctaacagtatagcaacttgggatgacttggtttcaagattttttgcagagtatttctctatggacaaatacaatagattggtgaacgatatcaccaactttactcaaagtggaagagaaactctatgcactgcgtggaagagattccaagcactagtaaggagatgccctcaatatgatatgcctgtaggtaaacaggtcagaatatttttcaatggcatgactcccgagacaaggatgatggtgaatgttgcagccggtggtactataagatctaaaaccgccgcacaaacatatgagttaatcaaatctttggcaagaactgagaatgaaagccatacaatgcagccaaagagggagcctatccaattaaataccaatgatgcaatgcttgcagagcaaaagattctagcgcagcaattagccaaattaagtgagaagatggatcgattgcaattttctgcagcacaagtgggcacaagcaaaccatctgttgtgtgtgaatattgccaaggtgagcatgagtctaatacttgtcctattttaattggcgctgaccctgtgcaggtaaatggcgtgtggaacgatcaaaggcaacaacaacaactataccagcagcaaccataccaaaggaacaattatgcagctggaaacaattatcctagaagatttcaaggaggtggtttggattacaagtccaacaattacttgcagccccctcctattccgaataaagaaccatctgagttagaaaaagctgtgatacaactaactaagaccaccacggagtttatagctgaaacgagagctcaccggaccaatcaagacgcttcaatcagaaacttggaaaaccaaattggccaacttgcaaaacaaatggctgaaagaccacaaggccaatttccaagtgatacggttgtgaacccaagagagcatgctaaagcaatcacaaccagaagcggtaaagtattagtaaccccagagaagcacgaatcaagtacccaagaggtggacaaaaattctgcagcagttgaaaaagagaaagaaaaagttgcagaaaatttggaggaaaaagatcctatgcagccaccaaagaagtgggatttttcacgctttgaaaaacccccttatcctatcttaaccaagcaacaagagcagaaacgtcaatttctaaggtttttggagatgttcaagaagttgcacatcaacataccattcgcagaggcattagctaacatgccaaactatgcaaaattcatgaaggaactcctatccaataagaagaaactgaaggagtgcgaaacaatagcattaacagaggaatgcagcgcaatcattcagagaaaacttccgcctaaattgagagatccagggagttttaatattcctattgctattggtaatattgatgtaggaaaagcgttatgtgatttaggggctagtataaatcttatgccattatccatgtgtaagtccctaggcataactgaacttaagccaactagagtatctttgcaattagcggataggtctttaaggacaccctccggggtgatagaagatgttctagtgaaggtagacaaatttatatttcctgcagactttattgtgcttgacatggaaggggaaagcgaaatccccctgcttttaggaagatctttcctagccacggctagagccttgatagatgttgaacaaggcaaattagagctgagattagataatgagtctgtggtttttagtgtatttgatgcaatgaaacaccctaacgatgagcatgattgttttcgtatagatgtattggatgaagcaatttgtgcaggttttaaatcaagtgttgcagcaattgatgaggaagatatatcacaagatgcaaccagcaccgcacatacggatcatgcagaaaaatcaccaacactaacacaaatacagctgcaaaattgtgaacccagagatgctgaaaaatatgcagaaaattctgcagcagagaaattagaaaccacacatgcagtagaagaaaaaactgcagcatctaatcctgaaaatgcagaaacaataccagcagaaccgaaaattgaagagctggaaattaaagaagatgacattctttccggagcacccaaggttgaactgaaagagttaccggaacatttgaaatacgtcttccttggagaacaagaggcttatccagtaatcatcaacagaggcttagattggcatgaagaagtcaaactgattaaagtgctcaaggaacacatatccgctattggttggtctatttcagacctcaaaggtataaatccttccttgtgcactcataaaattttaatggatactgacgttaaacctgtaagacagccccaaagaaggcttaatcctgtaatgaaagaagtggtaagaaaggaagtcgtcaagcttttggatgcaggtatgatttatccaatttctgacacaccatgggtaagtccggtccaagttgtccctaagaaaggtgggatgacagtaatacaaaatgaaaaaaacgaactgattccatctaggacaatcacgggctggagaatgtgtgtagactaccgaaggcttaatgatgcaacgcgtaaagaccattttccacttccattcatggaccaaatgctggaacgcttagccggtcacgactattattgtttcctagacggttattctggatataaccaaattccagtcgcaccggaggaccaagaaaagaccgcatttacttgtccattcggagtatttgcctatcggaggatgccatttgggttgtgcaatgcacccgccactttccaaaggtgcatgctttccattttttcagacatggtagaacgaggcttagaggtatttatggatgacttttctgtttttggaccttgttttgatacatgtctacttaatttagctaaagtgttaaaaagatgccaagaaactaatttggttttaaactgggaaaaatgccattttatggttagagagggtatagtacttggacacaaaatttctgaaatgggattagaggtggatagagctaaactcttacttattgagaaattacctcctcccattaatgttaatggtgttcgtagttttcttggccatgcaggattctatcgtcggttcattaaagacttctccaaaattgcaaaaccattgagtcaattgctggaaaaagatgcagagtttgtgttcaatgatgcatgtcttaatgcatttaatgttttgaaacaaaagctaactactgcacctgttataacagctccggattggaacttgccttttgaattaatgtgtgatgctagtgattatgcagtaggtgctgttttaggacaaagaaaagagaagaaattgcatgttatttactatgctagtaaagttcttaacgaggcacaagttaactatacaaccactgaaaaagaaatgctagctgtagtttatgctttagataagtttaggtcttatttggtaggatctaaagtaatcatttacactgaccatgcagctcttaaatttttactgcataaacaagacgcaaaacctcggttattgcgatggatgttactcttgcaggaatttgatttggagattagagataaagcgggagtggagaacaaagttgcagaccatctatctcgaattcaacacaacaaactgcaggatggaccagagctagaaataaacgaagtctttccggatgaacaattatttgctgttggagttactccatggtttgctgagatggcaaactttaaggctgcaaaaatcatacctgaagcattcacttggcagcaaaggaagaagtttctgagtgattctaataggtatctttgggataatccatacttatattttaattgtgctgacaatattatacgtaggtgtgtacctgaaagtgaagtgccaaatatcctttggcactgccattcatcaaactacggaggacatttcggtgttaaccgaacagcacaaaagatcttacagtgtggctactattggccaactatattcaaggatgcaaaggattttgtacaacaatgtgataattgccaaagaactgggaacgtgtcgcgaagagatgaaatgcccttgaacaacatacaagaagtagaactattcgacgtatggggtatcgacttcatggggccattccctaaatcatttggtaaccaatatatcctagttgctgtggattatgtctctaaatgggttgaggcaactgcattaacaaccaatgatgctaaagtggttataaactttctgagaaaatacattttcacaagatttggtgtaccaagagccataataagtgacggaggaacacatttctgtaacaaacatcttgagagcttgttagccaaatatggagtgaagcacaaagtagcaaccccatatcatcctcaaactagtgggcaggtcgagatttccaaccgtgagctgaagcgaattctagagaaaaccgttggaacgtcaaggaaagattggtccaagaaattggatgatgctttgtgggcgtatagaactgcattcaaaactccaattggtatgtctccctttcaattgctctatggtaagtcttgtcatttaccacttgaacttgaacacaaagctttttgggcaacaaaattcttaaattttgaactaaccaaagctaatgaaaagagattgttacagctgaatgagttagatgagttcaggttgaaagcatatgagaatgctcgcatctacaaggaaaagactaaaaggtggcacgataaccacattagacacaaggaattcattccaggccaacaagtgctactctacaactctcgactgaagctttttccgggtaaactaaaatcacgatggtcagggccattcctggtaagagaagtctttccctatggtacaatagcaatttcagctctagatgatgataaagtgtttaaggtgaatggatatagactgaaactctactttggaggtaaggtggacagaaactcaagctctgtaccacttcaaactaacattgaatgaattgaagtaaaagtctagcttaaggactttaaacaagcattgaagttgtatataggttaaagttcagtagatagtcttagatttcaattcatgcaatttaagttcatgcatcatatttaattttaaatcatttcaattttgtctaaataagtaataatatcaagtaggagtagcttagtgaggaaattaaagagtggaagaaaatataaaggaagacagaaaaagcaagtcacgcgactcgcgtggcaaatcacgcatgtcgcgccatcaacactgtcaaaccacgcgactcgcgtggaacccaagtgactcgcgccatctgcaacaaacagcatttattatctgcataaattcacgtatcacgcgtgaaactcaaatgggtcgcgccaccaagcagtgttcaataaccttatcccacgcgacccacgtgacaacatgacgcgaatcgcgtcatagctagaaatccaaaaggcaatcaggtcattccacgcgacatgcgtggaatatcacgtgtatcgcgtgaaacaacaaaaccaaaatgaacaattccacgcgagtcgcgtggatagtcacgcgactcacgtgaaccttactgatacatggcgcgacatacgtgatatatggcgcgagtcgcgtgaatgcgcggaatcagtttttaaaatcaaaatcccagaaaccgcgcctcactcccactcttccctttctttccctcattttcgcccagaactccctcaactcccattaacccacattaaccccctcacactcaatcactctataaaagaccaacattattcatccctcagtacattcttaggcatcctacgtcgctgcacttcacaaatttctgcattcaactgagcaatggccaaggacaagggaaaacaagttgagcagaccacaccagttaaaaagggaaagaagaagactacaggggagagcagcaagaagagggctagggtagctgactttgatgagctccgctttcgcaccgcagagtgccaggctaagtttgattcttggtatttacccaagaatattatcagggagcggaagatcatgtgggaggagttccctgaggaccatcccatcagacaggtcatagttagacgacgatggcagagacttgtctcctttccagagcccagcagcagcatgatcctcaaggagtttctctccaatgtggatcaggacacagtttatcgcaccaggacctcatgggtgagaggagtccaggtaccatttggggagaagaccattgaggctctgcttgacaccgactacgatccattcaccgcatgcgacttcatccgattattttggcacatgcagccagatgcggtgacgaagatgtataacgatgatctcccggagcttgccaccaccatccgccgagccattacatgcttatactcagcttggcagaccaagcccagcatggactacatcccagacaaattgaagaaatccgagctggttggagacgctgccttttggcacttatttattaaccacacggtcatgccatccagaaacttgaccgatgtgaatgtcgagcgagctattctcctctatattctccggggtgcaggtaacctcatgatttcttcagtcttatctgattggattttacagatgatacaggatgtcggcacacggtcctggattggccactcctcactcattctacttctttgccggcacgctggggtacatatcgacgaggatgaggacatggatgtccctatagcgccactcatgactttgaagacgtatactactgctgtgagcgctgcatcaaatgagcaggtggttagagcttctaagctcacacctgaggccatcgccgctgcctctcctcgagactttcatgcagatgacccccagcctgacccgcaggaccagccagctcctacaccaccagtctcccccattccacagacttccatacctacttcaccaccccatacttctatgccaccaccatctatgcccatacgcactcccctatacgaggactcccagaacttcattgatttccagcattttgtgcggacccagctccagttccagagtgagcagctagccctgcagacgcgcatgtggggagctgtatgccagcatttgggtattgatccgtcggagtatcagacctcagttcctacacacccaccacagccttctcagcctgttcctgcagctacagaccccattgatcagccatcggatgcggatatcacagcttcccagccagtagcttccgaggccacagagatggctgcagaggacagagaccctcatgattgagcaggacttttattttatgttcttttattttcagatatatatgtttgggttgttatttttagtattatgcattctacatacattttattcttctgcacatttacatttcatcgacattctatcactcacactttgatattactgcatcatattatatatagaacagttcatagttataatttctcttatccaatctgttttgacgatcaagaattgaatgcgattttccgaataatgcttaaatttttccaaagcgctatgaccaagtttgtggttgctggggacagcaacatataaatctgggaatggttacgcattatttcgcaaatcacaatcaagaatcaaaagaagtctaacagaatttttgaaaatttttcatataatcagaatttttcaaacaattaaaaataagcagcacacaactctttcagattaagaaagcgaataaaatcattaataaacggatttctttgaatcaagtggaaattgattgatagtatttgaaactcatgttgaatgttgaaatgatgccagatatgcagtcgattgagaacgacttgagtacagcacctgtaagaatttgggccaaatgtcggtaaattttcttctgagagactccatgctttatagtattctagaacttgatttgtttctctaagtgcaggtgtgacttgaaatgattaaggcatgatttattctgaaaactagggccaaattaacctacctgaataaaattttccattgaacctaaattttgagcctgagcctttcatttcaataaccaagattaagctatgtccaaatgactcaaaccttttgaggcttaagaaggtgaactaagtccatgtcagaaaagaactattgatcgagcgatgaagaagaaagagaagagaaatcaaattaatgaaaagaaaaagttgaaaattctcagctgaaaagtttaaaaagctgcaaaaatatttagcatgtctgattacaaagtatttgataagaaaaatttgaaaaagtaaaaagaagtagtattatgtgattttgaattaaagtaccagtttgaagaaagaaagataagaagcttgaaagaccacagtatgcttggacttggaaaaccagacttagcctctgattaagctaatttttccaaaattaattctcacctcttagccaagccacgttacaagctgtaaaagaccttctgatcaagtcatgattgtaactaatgagaatatcttcaagcttatggtaatgctttaatcatgttgagtaagagggtaattataacctgaaacacttgagtgaatgagtgaatatatacacatccgtgaggtaaactcaagtagttcttatgttgataacaatgaaagcatcatggaagatttagctgagtagattatacattcatgatagttttatgattgaaaattgtggtttttgttgattgttgattcttgcttatgtcttagaactctttctattgctgaggacagcaactttcaaatctgggaattgtttgatgtgttgcaaacacatcttaattttagcattagttttaggtcataattgtagtaaatagttagaaaatagtataagaattagtcatatttattattttacattataaaagcattttaatatcatgttaagtgtttgcaggccaaaacaaaggaaattaagagcaaataaagaagaaaaccatgactggagactcacgcgcatcgcgccacaactcacgcggttcacttggacgtccagaaagcatcacgcgacacgcgccatgtttcacgtgagtcgcgtgacaaactcaaagataaaccatttcagctctgacctcccacgcgacatacgtgagaactcacgtgagtcgcgtgaatacttcaaaggataagcaattcaactctgtgaagccacgcgagccacttcagctatcacgcgcatcgcgccattctctactgccatgtcacgcgagtcgcgtggtgtcgtgcgcgagtcgcgtgactgcgtttttcttgcctgaattaagaagatatttgctacgaaaataagatgaaagcatgacttagttactgtaattaaaaccttcgataaatagagagtttctgagcttttagagggtacggagacacttagacacaattacacacttagaataagagtattattattgaaggcaaaccctaggaatcaagattgaagccaattctgcagaatcatgtttcatccaatcgatttggtgttcttgaagcctatggctagctaatcttcttgttgtggaagggccatgaacttatgagttttccctctgtaaattgactggtattaaatgcatatgttttgtttatttcaattcttttctgtgcttaatcataatcttgtttagaattgatcactctgaatgggtattaagagttatacttcgcaatggacacgttggaattataatatctgacctgttaagattgacacttgttcttcacctagacatagggatgcatgagtgcggaggtataatatgctctttgattacttgaattgactagtttcactaagacattaggttatgaaatcagttcaaagggttaattcactaaggcattaggaattagctacaataggaaagacttattctccgaataaacataacacgaacccataagatttgttctttgacttcttagtttgacagaatcgctataaggttagggttctcgatcgaattaaagggtgaaatcgctagttaatgctcttaagagtctaggatttacgaaattaggaaagacttgtcttatgtaaacttaaagataaaaccatcagtcaattgaaggaggtaacgcttataagggattgtacctgaccacaaccacttctcattggtaatctttcgcttttaatttactgctttgtttaaattcattcttcaattcaacttaatcatccaaattactcttgcgtattttactgttcttgttcaatcacaacttttacaattattgcaaaatctttccaatccctgtggagacgatactctacttacacttttattacttgttaaacgatcggtgcacttgccgtatcaatcgcgttaatcgcgcaacagcagttgatttttaacatggcagctaactatcaacaatttggtgctagagttgcagcatccaaggttgcaaatgaagtttctgtctctatggttgctgataaccagagattggagaacaaattgacagagttgacatcccttgtgaggcaacttgccattggtcctgatccacaacaacaacaacccttcagacctccacaacagcactttcagcctgccaccaccaaatgccaaccttccccactcagacaacagccacagttccagcaagttgcacctacacctgctcaacctgtgcaagccacttctggaccttctttagaggacttgatgaagcagatggctgccaccaaccttcaatttcaacaaaatgtcagtgctaacatccaagacctccagactcagattggacagttagctacaactgtcaaccagatgtagcagcaaggttctaccaacattcctgcacaaccagtgattaatccagagaatgtgaatgccattaccttgaggagtggcaaggaaattccagattccacaattgttggtgctaaatcagatcctatagaggagcgttctatttttcttcttgatatcattgatgttgcagtagatagtgtagatattcctgatttaatttctgatttttcttctgaattttctaactttgatcttggttcttgtaattgtgtctgtgatgactctactgttgtgtgtagtatttgtgcggagatttcctctgcactttactctgattgtgttgcaggtacaaacataggatctgagcattcgatcccatttccctcagccgctactctttccttaccttccactattcaaccaccttccatggagctgaagtcaccacttgagcacctcaagtatgcatatttagatgatgctcagaagcttccagtcatcatatctaatagtctgtcaatggagcttgaagataatttgatgcatgttttgagaggccacaaaaaggcccctggatggacacttgctgatcttcttggaattgatcctcccatctgcatgcatcaagaaaattatgtttgggatgtaccttgaacgacactttgggagtttcctttccctccttttatttgttgtctctttgtttgcatttctttgcatgctcacattgaggacaatgtgcatttcaagtgggagggggggtgaaggatcttaaaaatttgtttcttttgttgttttctgttttctgtctgtttatgttttcttgttgtctgtttgtcagtgtctgttgttttctgtttatctgtctgtcgatattctgtttttctattttagtttgagtctgtatgtttttgttgtctgtttctgctatctctgtttgttgctgtttttattgaatttaggcactttttcatgtttttcataggatttccaatttgcataaattgtgagaaatgttaaaaagttggttggattgagatgtttcatacttgatgtgaatcattgttgcaattattgaagtgataagtaggcttgagaaatagaacttaagatgaaccatgtgtggtagaattatgccttgtgagtttttgagccttgtggatacgttctttcatgtgtgatttcacccttgtgctagattactctatgttttgccttgcctcttttgacattccttgttgcacatgctttgattgaaaagattcaggccttctttcttttagccactagccaaataagcctatccttatgttgatatccattgtcaccctttttgagcctttagccttttctttcttgtttagctcattaaaaaaactaaaaaaaaaatgatggaaaaccatgttaccctagctttagggagaaaaggggctttggaattgttttgggagtgggtttctgtaacaccctcttaattccctgtatctgtgtattttcttataaatatgcatttttagataaatgacataaatgcccttggatatttttagaaatgaccaaaatgtccttgaataattctacaaatgacggttaggtccctaggacaaatgactaaaatgccctgaacatttgctcaaatgaccaaaatatcctaaagtcccgaaaaggtcatctaggctctagtaaagtcctaggagtctgataaaatataaaacaagtttagacaagaaattattgatgctaatcataaagaaaaaccataagataaaattattagaatttttgaaggatagttcaagaaaaattaaatttaaaataatctaggtgcggttaaaataccgaagaaagacagatacaatctaggaaaatttctcctcatgatggtagaatgagattggttaatacatagtctaaatcttttattaattaaaaaccgcatgaaccaatagaaaaatagataaactattgaaagaaaatgaaataaccatataataaaatatgactacaacctaagctactttaagatctaattaaaaaattagaactttattttcaattaagacaaattgaattaaggattataaatcatggaaataaatttaccatgagattattcaaatataagatacaaaatgataaatttaagagttaaaattctttcaactataattaaattaactaaacaagccttagactacttaaaacaagtttaattgaaattgaatagctcaaaactataggttggccgtgcacctccataaatcatgaggaaaattgtagaaacttgtggaaataggacacttgggtggtggataagcaaggagacatcctagtggaccaagtggaaagtggctttaagtaaaaatcttccaaaaagccaagatatctcacgtacaaacccaaggcaccaagcctagccatgtgcacggattcaacaagaaacaaggagaaggaagtagaaaaatctaggtgtgggacacttggaaagcaaagaccaatcaaaaggaaccaacaaaaaagttaggcaataatgaatttgtgggatattttaagtaaagcaattgaaaccaagtataaaaggaatggtgggaccaaaaatgaagggcaattgcacggtcactcttcaaaacaaccaaccatccttttcaattaaagcaaacaaccaaaaccaaggtgatactataagccaaggtcacgtgaaagtgtagaaaaggtgaaaggcaagttgctgaatttcaaacatcaaagaaggccaaggtatgggaaagtaattaataaacatagattaggtagttgatttggataatttcctctctaatttttaaggttaaagataggtataatgaaactcaaagatagcatgccatgtgttcgataaaaagcctaaatgaactaatatatttagggaatttcaattggattaattagggagtttagaatgaaacaagttaattaaaatagcttattctaattaattaagatggttaattctctattgaagtggttgtagctacttattcgataaattcttgattgagtgtaactatacgttttatacttttaaattgctgtattttcgtggtggctgtgtaattttatttccttggtttaataattgttcttggctgtatgataaagcttgctgtctgtaactttatttagatgctactgtaagcaaataatgttggttgttatttaaaacataataaggctgtatagttaagttgttgttgctgtatgtgcggttgctggaattaaaatctgctaggaaaaatcatgctgttgtttgctgtctgttttggaaattaggtgctgtctgtctaactattatttgttgtctgtataaatttatttgctgtctgtttaaatgctgtctgttgtctgtacgaatttattttgctgtctgtttaaatgctgcctgttgtctgtacgaaaatatgtaatatttgttgttaaaatggctgtaagctgtatgttgagtggtaataaatctctaaggttccttctattaatttagccgtgaataaataattaagatgcgtgttatatgttgttaagattgactccttgaaattatgggcacttacatgtaatactgatggaagattaattaagtgccaaaattatgaaagttgagacataaaggagtaaccgacaaataaaatgaattcacgcatcattcgcatttgacttaaccctcagagtggagggaagtttcactagagtgggtgaaactactgtggtacctttttaccctcagagtggagggaagtttcactagagtgggtgaaactctggaatttaaaccctcagagtggagggaggatccactagagtgggtggacctatgttgcttttggtaccccgagaaaattatctgagatctcagtcatgcatcatttaataaagaaagcatgcatcatccatcatatacctgtctataagtattatattgatgtttccgtatgtttgttgtttattttaaagtttgttatgtatttattttatttcctgtcaattatctaatcatgtttattaaatacttacccaagttgtgtctgtggtttgacacctgtgatgaccccaattttgggtgagcagaagaacagtgaaatgatgaaggagcttgttgaattatatgctgtgttttgagttgttatccggatgatgtcacttgctgttgctgcttttggagatctgtgctattttggataatcggtgttttattttaatggtctgtatttcactatggatgactgtattatggactgttatatttactataattaaatgactctgtctatgaagtacgttaaaattagtgcgatttagcaaaccgactagaatgatattttatgtcttttcatttcaacgaaaatttttcgtaataacgtcgataatcaagtacgaattccgtattaatttaaaataataaaaataaaaacgaagtcgttataatagtggtatcagagcttaggttgatttctttggactctgtgattctgagtgcttgtttgttgtgatttcctgtgtgtttgtttgttataattttgtattgtatgtttttgtaccatatgtgttaatgggtatttgaaaatttgaagggtgctaaaataatctttatggaattcaaataataaaaatttatttatgtgggtctttaggacaatgaatgctgaaggtaatcataccatgatgtttatgttggtaaatgttcaacgataccgtgaagcatcagaggcaaatcaatccactacttattacaccatagctaaatatcaagcagaggcagttcttgaagaaccacttatcactaaagaactttatgacactgtggtagtaccctggaccgcagacagacaagtgtatcgtaaaattgagaacgtagtgtattatggaagtgaaaagccacctaatgctccaacagatgcttgtgttgggtactatgatatcgaaatagtggatcaaaacttttaaaataaataagatgaaataaggaaaatatatccatgtaaaatagtaggaagtagtagaagtacttcgtaaaataaatcgtaggaaaacttaagtagtagagtatgacgcggtatgttgtaaaaatggtagttagaagaaaataagtaagggatgtattataaacttaggaagctatagtgtaaaatgttttgtagtactaatatataaaatagtgtggtgtgattataagtattactcatgcttcaaattatttactaacgttgtttttgataattgttttaagaaacgtttaagcggatatacatatagataaatatggccggtaggaacgatcgagctatagctgacgcccttcaagctctggctcaagcagtcggaaatcaacaacgaaacgtgaataatgaatttcaaggatttgatagttttcaaagaaatcacccgccgagtttcaaaggaggttacgatcctgatggagcacaaacatggctcagggaaatcgagaagattttccgagtaatgacgtgccctcctgaaagaaaggtactttttgcaacatatatgctggctgaggaagcagaattctggtgggaaaatacccaaccaagactagaggctgataaccaagacctaacttgggaaatttttaagacagcttttctagaaaaatattttccagaagatataaaaaataaaaaagaaatggagtttctggaattaaaacaaggtaataagactgtagcggaatatgcagtcaagtttgaagagttggtgagatatttccctcattaccatggggtagagggagaaagctctaaatgtgttaaatttttaaatggactgaggcctcccaatccgagaatttaattcaaggtaagtgtttcataagtaaaactcctttaaatgtgttgtttgattctggagccactcattcctttatctcttatctgtgtgttaaaaatttaaaactttctgtgtctcctttaaatgtcaaattagtggtaactaccccgactagcaaatctgttgttacctctgaaatttgtccagattgtcaaatagaaattggtaatagaatattttccgttaacttgatttgcctacccttacaagagattgatgtcatacttggtatggactggttatcttcaaatcatgtcatgttgaactgcttcaataagaccataatattcgttgacaaccttccagccagtaaggatattcagattgtctcttctaacaaagtccttggaatgatgaaaaagaatgatattcaaatatacatgattacatcttactctgaatttaatactgaatctgatgaaagagatctgcctgtagtaaaagaatttcctgaagtatttcaagaagtggataagttaccacctgaaagagaagtggaattttctatagatttaattcctggaactggacctatttccttagccccttataggatgtcccctgtggaattagctgaggtaaagaaacaaatagaagaattgctgagtaaacaatttgtgagacctagtgtatcaccctggggagctccagtattgctagttaagaaaaaggatgggtctatgaggatgtgtgtggactatagacagttaaataaagtaacaataaaaaataaatatcctctacctagaatagatgatttaatggaccaattagtaggagcctgtgtttttagtaaaatagatcttagatcgggatatcatcaaatccgagtaaaatctgaagatattcccaaaactgcttttagtactcgatatggtcattatgaatacttagtgatgtcgtttggggtaactaacgctcctgctgtatttatggattatatgaatagaatttttcatccatatcttgataaatttgtagtagtattcattgatgatattttagtatactctaaaactaaggaggaacatgttgaacatttaagaattgttttacagactttaaaagataaacaattatatgctaaaatgtctaaatgtgctttttggttagagaaagtaaattttctaggtcatgaaatttctcagggaggaatctctgtagatccttctaaggttcaagctgtagtagaatgggaaagacctaaaacagtcactgagattaaaagtttcttaggactagcaggatattatagaagatttattcaggatttctctaaaatagctttacctataactactttaactagaaaagggcaagcctttgtatggaccactcaatgtgaagaaagttttcaaactcttaaaaataaactaaccacagcacctgtattagtgttgcctaatttagaaaaaccttttgtggtatactgtgatgcgtctaaaatgggtctaggaggagttttaatgcaggaaggaaaggtagtagcttatgcatctaggcaattgaaaacacatgaaagaaattatcctacccatgacttagaattagcagccatagtatttgtgttaaaaatttggaggcactatctatatggttcacattttgaaatttttagtgatcataaaagtttgaaatatttgtttagccaaaaggaattaaacataagacaaagaagatggatggaatttttaaaagactatgatttcgaacttaattaccatcctggaaaagctaatgtagtagctgatgctttaagcagaaaatctctaatggcatctgcactaatgattaaggaaagaggtttgttagaacaatttagagatctgagcctgacttgtgaaaccacatctgtaggtattaaactaggagctttgcaagtttctaatgattttctgaaagaaataggaaataaacaaaggtttgattctttcttgaaaaacataatagacaaaatagaaagtggagggagtagtgaatttaaaataggaacggatggaattctaagattacaagatcgaatttgtgttcctggtgatccagaaattaaaaagatgattttagaagaaggacacaaaagtaagttaagcatccatcctggagccactaaaatgtatcaagatttgaaggttttattttggtggccgaagatgaagaaagaaataagtgaatatgtatattcttgcttagtttgtcaaaaatcaaaaatagaacatcaaaagcctttaggaatgttgcaatctttagaaataccccaatggaaatgggatagtatctccatggattttgtgacctctctaccaagaagttctaaaggttcagattcaatatgggttataatagatagattaaccaagagtgctcattttattcctattaatattcgatattctttagaaaaattaaccattctgtatataaaagaaattgtccgtttacatggaataccttctaatataatatcagatagggaccctagatttacttcaagattttgggaaagtctacataaggctttaggaacaaaattaaaattaagcccagcatatcacccccaaactgatggacaaactgagagaactatccaatctttagaggatttattaagagcttgtgtgttagaacataaaggaaactgggaagaattcttacctttaatagaatttacttataataatagttttcattcttccattggtatggcaccttatgaggctttgtatggaagaaaatgtagaactcctttgtgctggatggagtctggtgaaaatttagttttaggtcctgaaattatacaacaaaccaccgataaaatcagattaattcaagaaaaaatgaaaactgctcaaagcaggcagaaaagttactatgatcaaagaaggaaggatttagagtttgatgtaggagatcatgtatttttacgagtcaatccttggactggtgttggaagagctctgaaatcccgaaagcttacacctcgatttattgggccttttcagattctcaaaagagtcggaccagtagcttatcaaattgccttacccccaaacctgtcaaacctccatgatgttttccatgtgtctcaattacgtaaatatgtccacgatcctactcatataattgaattagataatgtacctatcaaggagaatttaacttatgaaacctttcccataaggattgaggacaagagaataaaaaccctaagaggaaaagaaattcctttggtaaaggttatctggggaaatggtactgatggtgatgctacttgggaattagaaaatgagatgcggcagcactatccgaatctcttcgacacaggtaaatttcgaggacgaaatttatttaaggggggaggaattgtaacaccctcataattccctgtatctgtgtattttcttataaatatgcatttttagataaatgacataaatgcccttggatatttttagaaatgaccaaaatgtccttgaataattccacaaatgacggttaggtccctaggacaaatgactaaaatgccctgaacatttgctcaaatgaccaaaatatcctaaagtcccgaaaaggtcatctaggctctagtaaagtcctaggagtctgataaaatataaaacaagtttagacaagaaattattgatgctaatcataaagaaaaaccataagataaaattattagaatttttgaaggatagttcaagaaaaattaaatttaaaataatctaggtgcggttaaaataccgaagaaagacagatacaatctaggaaaatttctcctcatgatggtagaatgagattggttaatacatagtctaaatcttttattaattaaaaaccgcatgaaccaatagaaaaatagataaactattgaaagaaaatgaaataaccatataataaaatatgactacaacctaagctactttaagatctaattaaaaaattagaactttattttcaattaagacaaattgaattaaggattataaatcatggaaataaatttaccatgagattattcaaatataagatacaaaatgataaatttaagagttaaaattctttcaactataattaaattaactaaacaagccttagactacttaaaacaagtttaattgaaattgaatagctcaaaactataggttggccgtgcacctccataaatcatgaggaaaattgtagaaacttgtggaaataggacacttgggtggtggataagcaaggagacatcctagtggaccaagtggaaagtggctttaagtaaaaatcttccaaaaagccaagatatctcacgtacaaacccaaggcaccaagcctagccatgtgcacggattcaacaagaaacaaggagaaggaagtagaaaaatctaggtgtgggacacttggaaagcaaagaccaatcaaaaggaaccaacaaaaaagttaggcaataatgaatttgtgggatattttaagtaaagcaattgaaaccaagtataaaaggaatggtgggaccaaaaatgaagggcaattgcacggccactcttcaaaacaaccaaccatccttttcaattaaagcaaacaaccaaaaccaaggtgatactataagccaaggtcacgtgaaagtgtagaaaaggtgaaaggcaagttgctgaatttcaaacatcaaagaaggccaaggtatgggaaagtaattaataaacatagattaggtagttgatttggataatttcctctctaatttttaaggttaaagataggtataatgaaactcaaagatagcatgccatgtgttcgataaaaagcctaaatgaactaatatatttagggaatttcaattggattaattagggagtttataatgaaacaagttaattaaaatagcttattctaattaattaagatggttaattctctattgaagtggttgtagctacttattcgataaattcttgattgagtgtaactatacgttttatacttttaaattgctgtattttcgtggtggctgtgtaattttatttccttggtttaataattgttcttggctgtatgataaagcttgctgtctgtaactttatttagatgctactgtaagcaaataatgttggttgttatttaaaacataataaggctgtatagttaagttgttgttgctgtatgtgcggttgctggaattaaaatctgctaggaaaaaccatgctgttgtttgctgtctgttttggaaattaggtgctgtctgtctaactattatttgttgtctgtataaatttatttgctgtctgtttaaatgctgtctgttgtctgtacgaatttattttgctgtctgtttaaatgctgcctgttgtctgtacgaaaatatgtaatatttgttgttaaaatggctgtaagctgtatgttgagtggtaataaatctctaaggttccttctattaatttagccgtgaataaataattaagatgcgtgttatatgttgttaagattgactccttgaaattatgggcacttacatgtaatactgatggaagattaattaagtgccaaaattatgaaagttgagacataaaggagtaaccgacaaataaaatgaattcacgcatcattcgcatttgacttaaccctcagagtggagggaagtttcactagagtgggtgaaactactgtggtacctttttaccctcagagtggagggaagtttcactagagtgggtgaaactctggaatttaaaccctcagagtggagggaggatccactagagtgggtggacctatgttgcttttggtaccccgagaaaattatctgagatctcagtcatacatcatttaataaagaaagcatgcatcatccatcatatacctgtctataagtattatattgatgtttccgtatgtttgttgtttattttaaagtttgttatgtatttattttatttcctgtcaattatctaatcatgtttattaaatacttacccaagttgtgtctgtggtttgacacctgtgatgaccccaattttgggtgagcagaagaacagtgaaatgatgaaggagcttgttgaattatatgctgtgttttgagttgttatccggatgatgtcacttgctgttgctgcttttggagatctgtgctattttggataatcggtgttttattttaatggtctgtatttcactatggatgactgtattatggactgttatatttactataattaaatgactctgtctatgaagtacgttaaaattagtgcgatttagcaaaccgactagaatgatattttatgtcttttcatttcaacgaaaatttttcgtaataacgtcgataatcaagtacgaattccgtattaatttaaaataataaaaataaaaacgaagtcgttatagtttcaaacaagtgtggggtttttgtattttgttttgttttgaaagaaaagaaaagaaaaagagaaaagaaagagttcaaatagaaaaagttcaaaaaaaaagaataagaagaaaaaaaattgtgtataagcaaagaaaaagaagttcaagcaaagaaaaaaaaatatatgcaataaaagttgtcatagttcaagcaaagaagttcatcttttgatgcatgtgtatttcaagttgaatgaatgagaggtttgtcaatgcttggatgtgctagttgcatgtggtgtttgagtgtaaatacaagccatacacatcatgtgaggttgagtagcaccctttgagataattctatcaccttggtgcattcttgattctaaacttggctactttttcactttgtgctttgtgattatgtgttcatggattgtttgttacctcaacatcattcttccatctttccatctctcacttttgagcattgttgtgatccattgaaaaatatgtgtaccttgttcataccctttctttaaatttttggtttactttagtttgaatttttctcttagtcattcttttagttttgcccaagagtgcaaaagtttaagtgtggggtattttgatagagtgcttttagttgagtatttttctatccttcttagcttatttgacctctcttggacctttattttcctattctaattcagttttgggtctaagcaagaaagtgggcttaattactaattgttgtgtattttcggatttttggctcacttgacgtatctgacttgtgcaggacctatagggtgctactgatctccgaatggagcattctaggagtccctggaaagataacgaaaatatctacaattttgaaagaaatagcccgaggccaattctgtcatttagagggtcattttaagctttgaagttagcacctctgcacttgtaattttgggctgcgaatttgactttcatggttgtaaatagtaaataattagattgttgggtttgtttatggctcattctattttcagaacttagtcactaatatattagtgactttactgaaaacttggacagcacttttacattcaataaaaacagtttttatttttcttttttttagtttttaggatcaaactcttgttctttattttctctcatttgttcttcatcttcttcattttcatcttactatctttttattttactgcactcatttcatgggactttccatggtgatgatcatgggaggctaaatcatcaatcaatccaaggatccatctcaagcaagagaagaattggagttccggttcggtatttcgaattctacttgaatgttcaccttcttcttcaatttctattatgttttcatgattatgaatgcatttggggttgaaagtgagttaggattatggattgatgtcccaatttcaaatgataatcacaagattaattgaatgatatttcagttagggttgtggtttcaattgatttaggagtaggatcgattgaactgcttctattgagattgaatgaatgttcatggtagaatcaaattatgggaatgatgatgattcgaatagcttgggttggtgaattggattgatgctctctcacctgttttactttattccttgataatcttgttaatttttgcattgttctttaattttagtttgtgttcttgcatgttttactttgcgcataccaactgttcgacaaaatccccccttattattaccaatgatttgaagctagaaccatattaatcgtgtctctgagtcgacctaggttagctctgtgctatagaattagcttagtaaaattgttttagtacgtgtcgacaacgtgtttatcactaagcctgtggctacccccaaatacatagaattagactggtttactaggcaaggattccaatttcctgcctatctagagtctcaaagccttaggaggtttctagagatgaagggtaccttctaccctgagctagttcgagttttctacacctgcttgaagggttctatgcagggagatatgaggtccaaagtaaaaggggttaccatgcacatcacccctgaaatttgggagacagtaggaggaattgtctatgagggagctcgcagatttgatgaagatcctgatgggtacagtaagatggatacctacaggagcatgcttcatgacccacacatgaggcttaggactaggcttggcacaggtctaatgacagcagaagataggatgctgcactatctaagcacatacatcatcactccaagggaaaccaaccatgcccaagcaactgatgaagatcttcagttggtatatgggttgaagaaccatatccccatgaattgggctctgatctttgaagagatcatgctgaaatcaaaaaggttggttaactacccatttccctatcctgtttttgtttcaaggcttatagatcatttgttgaaaatgaagttgtaaacaacactctctcctacaacagtcaaattaaggagaaacatctaaccaagatgggcatgaggaagacacccaatggttgggtaatggctgcccaaattggtgctgctgagcaaggggagatggctgcagattctgaggatgaaggataacaagaacaaccacagcaaccccagcaagctttctcagattttgaatctcttatgattcaaaagatggattctcttttgaagctgcaagaggacttcaaggctgaaactcatgaagccttagaagatattagggaaaggctggaggctattgaaactaacatggatgatagagcctctgtagaattttaggattcttagtttatgcattttcttagtttatttttagataaaattatggttgtaatggactatattatgatctgttttattttgctttatgtactgccccatatgctatattattaatgaaattatgcatttctagtttaaaatccgctgtgctcacattatttttgacttttaacaagccaaatagggggagaattgattaagggggagtaaagggagagtagtttgatatgtactctgttcatccctgtttttttattcaatttttgcccaaaattgatttgaatgaatggtggaatttagggggagttaatgtgaaaaactgaacataatacaatggtataatgcttaattgaatgcctcatgagcaaacatgtgctttaacacttgtttttggcaagattgtttgcaagttttcaggtttataaagcttgttcaaacagtggcttttcaaattgatctccaagtacttatgcttaatcaaatggaagatttggcatgtttaaagccaaaaagggggagattattgattcaagtgaagccaagcataaatgaacagaagatcaagcttcaaggttttggacttttaaacatgctcaaaggaaatgctcaaaggaaagcttgaagaatcaatttgatcaattgtaaaaggaagtatatgatctgataatccaattgtgcacatcatgcattaatcattcatttaggatcattagattaattgattaagtaaaagaaattcattagaaaggcacttaggaagcaaagtttttggaaaaataaagttgcatatttaataatcgattacaagaatagtgacatcgattattttgttcttcgtgccctttagaaaacaaatcatgatcattgtaatcgattacatatcggtttaatcgattactaaggctttttatgcaagatacaactctctgtcttaatcgattacataaaattggtaatcgattacaagcctatacatgcataatagaagaatcacaactcactgtcttaatcgattacaaagctcatttagaaaaacatgtctgactggtttaatcgattacttcatggaataatcgattatattgttcatagcctaaacccagaaactattaggagcattttaatcgattacagtcttgatttaatcgattacaaatgataaataatcgattacaggagcgtgtttaatcgattattttcagttagaaatctgttataaattgaacccacttctctgaagtttgtaacttttgataatacgtattctgggctttcacaaacattctgagctttcattagtgagtttctctgagttctaaacacacttagcttcacaaaattcatatgggtttttgattcaagaaggtgaagcctcattcattcaaagcataaggaaaggactgcatatgtgattgtaatctgtctttcaacctgagaatcattcattgtgcattcattcttggattatcaggtgatagctttccttattctttgaaggtgtaacctgttctttgaattttttgtaaagattagtctattgtaattgagtttcttgcaagtagagatagtgtttctctaaagacagttgagtagtgttctcagtgtgggttttggtctctaaggatctaatagagttttagatctctgaactttatctagggttgatgaagagaggcttgtcaaattgcttgtaaggatatttttacaatagtggaactctactctagtgttgagtagaagaactggatgtagcctcataaggtttgaggtgaaccagtataaaaatatgtgactaatctttcttctcacctattcatctcttaattactttatttgtgaatcaatttcattgcacataatattatcctctgttttctattgttcttgaaaagggaagttgattgaatattgattcttggtttttagaacaattttttaagtgataaagatctttggtaaactctgattttttaaaattttaattggggaagattcaaccaattcacccccctcttggttgttttgaggtattctattcattttcaaaacttgtgttgtacgttatcattatgttttttatcattttgttcttttatttctcattccttatcattcagttcttttatttctcgttctttatcttttgtgcaatttacaacttcgttatatttttctcatattattgttgtaacgaccttattctgcacaccttattctgaattgaaccattaccattcacaattgggcatcaaccaaaaatcatttgcgttagtgtgaaaaagaaaaggggtagcgaatttttaaaaaaaagacaagagaagcccataaatgctttttttaagctgcttgttgtaaaaaaaaaaaaaaattgcttcatatgagaacctctttcactaattcattttacaattgtaaaagtttatttgtggtgctataacattattctttttttttctagtttcatattgtctgtgtttgaccttcttatttgagtgtgtctttctttgttaccttttctagtttgtctttttttttctagtgcctgtggggattcgccacaaagattataaaaacctttgataagaaccaaggtttggtccaatcaagaacccaaaagaaacttcctctcacacaactctttagagtgcaaagtttttattcaattcaaacgtgtctacataagacaaatgagtgactatttatagccaacaagtggtgcctctctcctttctttccaatgtgagacttcaaccacatattcctaattcaaaattacactaaaaaaggtctaaacaaaaagaacttttcttccataaattcgtgctgaacttcgtgtccaattttcatcatcatagatgcagaattagtacttgagactaaaaatatgacttgtaggaaatcttcggaattttcgaacgcaatcaaagaaagcctaaaaggggcatctagaattcaagttatgttcaaaacatttgagcaatttgggctcttcactcattggtctttgggctcttcactcatttgaatcaattggagcaatttgagctcttcttttgggttggtctttgggctcaaggcaaggttgatatcttggtccaatgcttgagaaaggaagtagttcacttcatgatccaatgtttcttgtgtttcctttgatcttgcccttgtcatgagacctcccagcccttgtagtgcactgttgggcttttgacccattggactttcttggttctcatcacatatacaaggctacgtataatgaccttgccaagtccatttatgaaaaagaaccaatggctttggtcagttcagcattcgccacactatttcttggacaaaccatttatagtgtatattggtcatcgtaacttaaaacacttctcatagcagtgtattacttctgataaaaaatgtcagttggataattacagtgttgtcaatagtggatcgcggaaaatcgcaaaaagctgaaaatccgctattgaatatagtagaagccgcatagcagttgaaatagaatatatatatatatatatatatatataacaattaaatatgtataaataaagaataataataagaaggtcgagtataagatagatgacatggacgaagaagggggagtattaaacaaaagaaagaaagaaaagtagttacctgtaaaaaaagaggcactggatggaaaaggctggaagttttggtaggggaagggtttatatggtgactaagaatcataggaaatgctaagaggttctagaatagtctagaaaactgaaaacttatgtgaactagaagtcaaaatgctattgctgggtctattagaagaaagcccaagtctataagtaaaaagtaaaaagaatagagtaaaaacataaaatttgactttgatgtctctttcatagatgatttcaaaatgtgatctcttcccgaattactgacgatacaccaaatggtgaaaaagtccatcaaaagatctcctgcagcagttagactagcttggtactataatagagtaatctttgaaaaattcacatgactactgcacataagttttaacttttaacaaagctaaaaaccttgtggactgcatgcccaaaacaactctgaagtacctgacctgaatccgcagtctcaaatccgcaatccgtacctaacccgatttcctctttcagaacaatgaaccctaaacgcgtcgtcgatgcaatttctctctagattcaaccttgtcggaaactgacgatgcaatagcctcgacaaaatgaggttccgcaatgtgtaaggtgtccacgattgcaattttcgtagagtccacaacgtgacataatcgcgattgtgtttaaacgcaccgtcgatgcaatttatctctggattcaaccttgtcggaaatcgacgatgcaacatccacgacacaatgaggtttcacgatgcataaggcgtccgtgattgcaatttttgcagagtccgcaatgtgacctaattacaattgtgtttccctaaaacccggtatgctatagcgtgatagccgttatttgacaacaatgctatattgtttgggtatttgaggtcaaatacaagctgaggttgcagaataaagaaatggatggtttatcaaggtggcaagatgaaggggaattcagatccctaattttgtaccctatctagatggatgaagcagttctaatcctagaagcacaaaattctgagttgcagggaattgtatcagaatttggcattaacccatattccaagcttggattcacttttctatataaagggcatgtagttctttcaaggccttccccctccattacattgctgctcaaggagtaacattctactccaattgggggcttttcatagatcctatgcacctacaggtggacttgactgcaaatgttttggataggaattcagaaaacagtttgggactcaacccaatatgagctcatcttatcaaccaaaaacagatgggcaaacggaggtagttaatagatgatgtttggagagttatttacattgctttgcatcaaaacagccaaggaattacgttcaccgggttcattgtgctaagttttggtacaacacaacttttcacatatcaactagttgaatcccttttgaggtcatgtatcagaggcagccaccgaatttgactaggttactcagtaatgagacaaaggtagctattgttgcactttaattaagtgaaagagaggtagccctcacacaacactaatttcattttgccaaggctcagacacaaatgaaaaatattcagatcgaaagaggcgtgcactgaattttgaagttggggattgggtttttcttaaattaaagttgcatatatagtaatcagtagctaagagaattcgccagaagctggctgcctgtttctatggaccttgcaaaatattggctaagatagaggaagttacatataagctccaattatcagaacattcaaggattcatctaattttccaattaaaagggccattggagattttcaggtgcagggttcttagagtataggactatagattacaatcttgataataaggtggggttagctgccacaagagttggaggtccgaactggttctgcatatcaattttaggccagaccactattacaagggaatggacttcaatgaagtagagtttgaccaagtggacaggcagtccgatcgaggatgtgacttgggaagatgatgtcttcataatttagccttgaagacaaggctggttctatagggggcaacattgatagggaccatgaggaagaattggacaagttggtactaaatagagagaatagcacaaggtttggcagatttactacaagaaacgttttaagaaaaataaaaaggcttagttggcaagggagggagagaaatgacatgtaagggggtgagttagttttataagaaatagagagaaaggggtcatcatgaaattctattagtagggacaaagagggatcactgagaatcttctctggttatgacacattgtggccaaccccaaatacactagcaagatagtgggtagcaggatgacgatatggcaacgaagaggtggtccccggtacatgcacaggtgatgattaaatcatcccattcatctatccagctatcaatacccatggataatagaaagtggtatagcgatgcatcggcatattaaggaacttgacggcgttcaatagattggaagaaagattcttgtgggatggaggtgaggatattaaacctaagtacctgggtgatgatatgatgttattcatggggcttagcgattccaaagcagaggaattgtgtagggaaacagatgaaagcggattgtccatgtttcacacactggataaatggagcccaacattaaggtctggttttaggctagtttgggtaccatacggggaaatcccactacaagcatgggatatggagaatatcaaaaagattgtggtaggggtgggtgaagtggtggatatggatgacgataccgacaacctccatcgcatggacagggcacgagtgctcatcaaaacaccatggcatcctacgattaaccacaacgtagttgtgtccattaacgaggtcaaatatattatcaatatggtcgaggagacatgctacatcccctgcagctgtaaatgcaacagggggagatttgcaaggtcttcataggagatatcgtctgacgagagtgttatagggatgagcaaattgtcggaggatacactgttgtcgtcgagtctccaacgatagctatggtggcggatgtagctaggggtgaatgcagcaataataggggggagaagctagcgtccgctggtcaacaggattctgacagaaggtgcagcaatggggatgaagcagtggatgctttctgcggaagacagtctcccacatacaagaggaaacttgttgaaagcgacaacaatgatgcaggggatactcgttagggagtaggggaggcagcaattgatgtggaaatggggtcagtgatgtggacttctgcgagaagaaagaagacagtaataagattggagaaaaaaagaatgtgatggacccacatttgacacaaaattttgaattaaagaagatggaggcacgtgatggttcagtgggaaaggaagctgcctggtcacctatgggacccacaaacaaatgcaatgttgaaaggctaggagataaatgtaggctgttgggccataacataaaagggcctgacccacagtggaaggtatactcaagaaacaagcggtgtaaaaaggattttcggcccaaagaaacaaatggaactcaacctgcacaagtaaaacaacaaatcattaataaagttagtggactgaaggaaattgttgattggggggaaaggcaccacggaaattatatttcaatggatttaaagtcagcctcaagtcttacaagttatgagtggataaaagaaacatccagcgattgggatttggcaaaacttttgggaacaaactgcagtaatcagaaagaaatggtgaacaaaatgatatccatgaaagaaagagacaagggagaggtttagagattgggaaacaatgaaggtgattgatgaagatcatatcatacaacataagggggttggggaggaggttaaagtgggcttcaataagaaaattggtgaaaaaaagggtgaatatgttatgtttataagagactgaaaaggaagtcattgataaaaaggtatgccaagctctatggggtgattctcatgttagttgggaatttcagccaacatgtgatagagctggaggactattgtatacttggaacaaggattcgtttaaattagagaatgtgttaggtagcgggttcatctacttggaagggacatgagttgcagatgaggaaaaagtcataattgtgaatttatactcaccatgtgagacaactttgaaaagaaacttatgggaagaaagcaggcaaatgagacatgcaaatatgggggggtattaaagtctggaataactcccagtttggtgatattcagcagaatctaaaaagtgtagagatggagctcaacaaactagaaatagaaggtgatgatagacaactgaatgatgatgagataaaatgcatcaattctaaggcaaaaggtaaggaccagatggatcagggaagggggttgcaattcccaattcttccatttgacagtaaattggaaacgcaagaataatatggtcagaggtgtgtttgttgatggctgctggttagaggagtcatgcaggtcaaagaagaaattagactcttcttcaagaggagaattaaagaaccagtgtggatgagacctgagttagatggggtcaaatttaatgtcattgaacaacaacataataaccttctggtggcatgttttggcatgaacgaagtgagggatgctgtatgggattgtggtggtgagaagagccctgggccagatggactaaatttcaagtttctcaaagaatctgggatgtaatcaaatctgacctacttcgtttttggatgaattctatgtaaatggcgtatttccaaagggtggtaatgcatcatttctagcattggtccctaaggttcacgacccctagagtttaaatgaatataggcctatttcattaataggttgtgtataaaattgtgaccaaggtgttgtctacaagatagaagaaggtgctgccactcatcgtagatgatcaccaatatgcttttatagaagggagacatttgctgcatgtggttatagcaaataaggtggttgatgaagcaaaaaggagtaatagaagttgtcttgttttcaaagttgattatgaaaaggcatatgactcagtaagctaggattttctttcatatatgatgaagcggatgagtttctgctctaagtggataagtcagattgaaagatgtataaatcgcctctatttctatattggttaatgggagcccaattgtagagttcactcgtcaaagaggactcaggtaaggagacccacttgccccattcttattcaacattgtagcagagggcttaactggattgatgagagaagcacaagagaataatttgtttgaaggctttaaggttgggaagaaaaatgtagacatcaacattttacagtatgcagatgatacaattttctttgggacaacatcggtggaaaacgtaagagcaatcaaggtgatgctgaggaactttgaattggtgtcgggtgtgaagataaatttttccaattgtagatttggggtgttatggatgaatgaacagtggattaacaatgctgccaactacttaaactgtagagtgttgtcgatacctttttcttatttgggtgttcctattggggaaaacccaaggcactgtgagacatgggattttcttgtcaaaaagtgtgagcgaaaattatcaaaatggaagcaaaaatacctctctttcgggggaagggtgaccttgataaagtcaattttgaaatcgatccccatatttttcttttcttttttcagggtgtcgaagaaagtggtgaataggttggtgaggcttcaaaagaggtttttatggggaggaaatgcagatcaaaagaagattgcttgggtgagctgggaaatggtttgtcaaccgaaggagaaaaggggtttgggaataaaggatttagtgaagtttaatcatgctttacttgggaaatggtgttggaatatgtttcctcaccatgatgaattgtgggcacaagttatggattcaaaatatggaggttggaggaatttggatgagtcaagacgatctgtgagtgaatccatttggtggagggacctgagcctcatttataattcgaatgaggaggggggatggtttcaaagagggacaagatggaatatggcttgtggttcaaaggtgttgttctgggaagatggttggaagaaggatgggatgtcactaaaggagaagtacccaagattgtaccatatctctcaacaacaacaagaccatatccaacaaatgggtataatacacaaacaggttgggaatgacagctccagtggagaaggttttttatggagggagaagaagaatcagttataaaatttttagaagatatacagggtctgtcacttgttaggatttttcacggcaagcgcactgttttatcgttacaagttacaattttgtaaaagttcgtctccacagggatttgaggttacgttggttggtttaaattgttaccagtctagtagttatatacagatgatacgaacagagatacatttgttgttttgtttgtaaagtaaagtaaagattacgaaaaacaaataaacgattacagaaaataaataaacgagtacaagtcaaggaagtgtaggattggatttcatctttcttatccctttaattgattttacctatgcattttctattcttattgccgcacacgtttatgtaaacttaattcgattcctcgcaattaagtcctaaagatattttactaaatatcgatccctcgcatatttaattaaataccctagcattaagtttctaatcacgtgtttcgtgtgatcaaaacattaagccctattcctagcaacgtaacgtagagagtgatttaattcagttcaaaccctaaatttactttccagtcgcctttagggttaaattcatgaaactaacgattaattagaatcaggcgttaagcgtagaataaaatcaccaataaggaatagaacaatgcataaatcattaaaagagcatagcgataagaagagtacgtccaatccttaggaaagtttaagcgaacattggcagaacctcctcgagagaaccactgactaagctcgtcatcgatcctctttttggcagaatctccttatacaagtcactctttctcacttccctaagttctacactcacttaagaaccaagaacaagctaactagggataagcaggtgtatgggagagaaaatgaagtggaaaatcatgccttagccttcaaaatccgtccatatatataggttttgtggacctggctgctttggtcgcccaggccaccaattccttcataaaataggtgtctgggtgagctaaaaggctttcttggaacttgttgctcgcccaggcgagcaaaataggcataaactggtcgcctgggcgagttaaaagcttagtcatgaaggattctttgggccttggtgcttgttgggcctggaatgctgtttgggacttcattctttgcttagttcactcccagctcttggttttcgcaagcttgattctttcataacctttaaccctagcaaaattaaaacatttgattggacgaaatcttttaaaaatatgaaagcataacttaccttaatataaccatcaattaactaggtttctagggttaacttgtgaataaatcaattaaattaacggataagtgccatattttaattctatttttactaaaatgtggcacttatcatcactacaagtacaacaacaagacacttggaggtgggaggatgatttgagtgggaatgggaaatatacaatggggagcgcttacagattacttaacagggatttgacaatccagaatcaggatgatgtgttcaaggctttcttgaaactaaaaatccctagtaaagcttcatgctttgcttggagattgattagggatcgatttcctactaagaagaaattaagaaggaaaatggaactcaatgatgtcagctgcctattttgtaggaatcatgatgaggacgcgtctcatttatttttcagttgtgctagaattttgtcattgtggtgggaatcaatatcatggataaacatagtgggggtatctttggtaactcccaaagaacttttcgtcaacatttctactattgtattaatggactcagaattcagagatggtagacttgggggatagctatgacctggtgtatttggcatcatagaaataggattgtctttcacaataagagttttaatggtcaaaaattgatggaggatgtgctattcttttgttgaacttggctaaaatatttggagaaaggatttgacattccttttcactattggtctactaatattagggatggcttttgtagtcagtggagggattaaaatatagttttttcctttttgatatgggtgtgagccttgacttcagccagttttttttgtccaaattcatttatgtattcatgtattaggttgtcatagttctgcaactttagtcactaggttgtatataaatcagtactacttgtgctctatttatctcatatatataatatatttttgctgatagaataaaatgagctctattggaccaaaacaaagcaaataaaagcataacttaatttaccagtcattctaaaaggcagacaatcatctgaaattttcagtgagtttctttgaggactagaagcatagaatggagcctagagaaaatgaaaataaatgcatacctgatacaaaacatatttgacagatggatcatttttcaactctccctcaagctcaaataagtgaagcttccactgcagaaaacaaaaccaggttaatatttttatacaatattatgctaatagtatgtagcttatacccagggagaataaatagagggattgagtataaggatgaattttttcagaatacacatcctgtataactgaacactggcccaaaaatgaccattctagaccataagcagcagcctgctgatgtatttttactacctacaatattaattttaacaggaaaataagcaaaaaaaaaaaaaatcagctcatcagactaacacagttgttacacaaccactaataagatcacactaccaggaatttgttttgctcccaacactagtgttgttagggtaaaaatcacaaaatgttggattaaagtcatagaactctgctaaggaatagaaaacaagtgtggccagccgtaggaactataaatcaccagctcataggtaaacttatttaataaaaggattacgatattgttaggaacctcgggtttatacaacaagaattaggcatgacaggggtatgtgccataatttaggcccagttgtaaataattctgaaacggcataggctgagaagggaagtagttagatagggagaaagacttttagtgggaaagtagtagtagaggcaaataaaagagtgtaacagaaaggaggttagtcagttttgatcattttgtagattagtttaggagagagtgaaggctatacaattctctcatctggaggcattcttctgtataccttgttctcaatttctaggctttctaggaccttgcttgtcaaactcagagaagattgggtcaaaaacctgtgctctcctgctggagaattctcatataaatacaaattgattacaatctgtcaagctgattttcagcccactaaataagctaatacagctgattatcctaattaagagaataacagttacaaatatcttttggcattaattttgttgacatcccccctcaaattgatgctggtgaatctacaagcatcaatttgccaagtagaaaattgtgacgttggcgtggcaatgttttagtacaaatgtcagctatttgaacagatgttgagacatgtggtagagtgatgaccctgtgatcatatgcttctcggatagagtgacaatcaacctcaatgtgttttgtttgttcatggtaaactggatttgctgcaatctatatggcactggtgttgtcagcatgcaatggagtgggttgtgcttgagataatccaagctctgtaagaagaccacgtagccatattatttcagaacaagttgcagacattgcacgatattctgcttcagtggatgactttgagaatgaatcttgtttcttacatttccatgaaataggagcattccctaggaacatacaccagccaatagtagatcaccttgtgtctagacagccaacccaatcagcatcactatatgcttggaggtgaagagatgaattagcaggaaaaaataaaccacaccttgaggtgccaaggagatatttaatgatgcgctgcactgctgaaaaatggaagtgtcgtggagattgcatgaacttactaacagtatggacaacaaaagaaatatctgggcgagtgatagttacatagatgagactatgttgcgcgatttatgcgaatatgtttacggcaagtgcaccgatcgtttaacaagtaataaagtgtaagtaaagtatcgtctccacagggattggaaagatttcgcaataattataaagattataattgaacaagaaacagaaaaagtacgcaaaagtagttggatgattgtgttgaattgagaaagaaaattgaacaaaacagtaaatttaaaatcgaaagattaccaatgaaaaacaattgtggtcaggctcaatcccttataagcattacctccttcaattgactgattattttatcttgaagtttacataagatcaatctctcctatattcgtaaatcctagaactactagagtcataaccagcgattcaaccctttaattcgatcgagaaccctaaccttctagcgattctgtcaaactaagaattcagagaacaaatcttatgggttcgtgttatgtttactcggagaataagtcttttctattttagttaatccctaatgtcttagtgaattaaccctttaaactgagtttgtaacctaatgtcttagcgaaactaatcagttcaagcaattaaagaacatattataacctccgcactcatgcatccctatgtctaggtgaagaacaagtgttaatcttaacatgtccgatgttataattccaacgtgtccattgcgaagtataactctcaatactcattcagagtgatcaattctaaacaagattatgattaagcacagaaaagaattaaaataaacaaaacatatgcatttaataccagtcaatttacagaaggaaactcataagttcatggcctttccacaataagatgattagctagccataggcttcaagaacaccaaagcaattggatgaaacatgattatgcagaactttgactccaaatcttgattcctagggtttgctcttactaaaactctctattctgtgtgtaattctgtccaagtgtgtctctctatgcctccgtgtctctaataatccagaaaactctcctatatatcgagtattttaattacagtaacaaagcaaaactttcttcctaatttcgaaacatatatcttcttaattcaggaaagaaaatcataaccacgcgactcgcgcgcgataccacgcgactcgcgtggattggcagaaaggattggcgcgtgtcgcgtggaacctgaagtgcttcgcgtgaaaggtcagtgaagaattgcttatttctttgagtactgacgcgacccgcgtggattaccaagtgtgtcgcgtggaaggtcagagctgaaatggcttaaacctggaagttctcacgcgactcacttgaataatggcgcgacccgcgtgatcttctctggtcttccaagtggatcgcgtgaattgtggcgcgacccgcgtgatgctccagatcttgtttcctttgttatttgcctataaatccctctttttgacctgcaaacacttaaatggtattaaaatgccttatgtaatacaaaatactaaatatgactaattctagagttattttctaactattcaatacaaatatgacctaaaactaagctataattaagatgtgtttgcaacacatcagactaccaactaactttcgatattgagtgggatcgtcaagaagttctccttcatcttgtctatatttaacattaacttccatgggagtgtcaacaggggtagcatttgtgagtccagctagttggaccaaatcttgaatatacttctgctgatttaaaaaaatgcctttagaatgataatacacctctaaacccaagaaataagtgagatggcctaactctttcatgtgaaaagttgaatgcaacatttttttaatgctagagataaactcttgatcagaaccagtcactacaatgtcatccacataaataaaaagtacgatgcctttagaagtcctttggaagaaaagtgatggatcatactgactttgatggaatgaaaaaccaagcagtgtggagcgaaacttttcaaaccatactcttggggcctgcttcaatccatataaagagcggttcagtttgcaaacagtattagcagaagaagtggacattgtaacaccccaaaatttagggaattacagacaattactaagagtgaaatgttaaggaaatgcagtagaaaaatttaggacaaaatgacaagaatgcccttgaacaatttcagaaatgacgtctatatccctagggcgaaaatgacaaatttgtcctaaacaattctggaaatgaccaatgtattcctagatattttagtaagatatttactagagaaaattaccaaaatgtccttagacaatttcagaaatgacaaaaatgcctttgaggacgaaatgacgaaaacgcccctggatattttggaaataaccaaactgcccttagatattttagaaaagatattttagattggaaatgtacataaatgccctagaatattttggaaaggataaaaatacccttagatattttgaatagatattttatgatgaaaataaagaatactcttagatgacggactattgaaaaaattgtgacagaaagccataagtggaataaggctttcttaagcatcaaatgatataaaaaagaagaaaatttctgtttccatccctaggtgtatagagtatgtgaagatgtcaagttatggggaggttgtttgaattgcgtgtaatggagtgattctgaatttaacctgaaaacctattttagtaaaattatcattatagattctttaaccgttggatcttactcaaattttaaatcaagatttctaactcatatatctaacttttgaccgttgggattgtgtaaataatgtctggaatgtgagaaattaatttttcgctaagacagaaaattctagaaaacgggcttctcacccaggcgagtggaacagactatttttggtcgcctgggcgagtgaaggcggtgctgagcatctatataaagccccaaggcacaaaaatggaggaaaccaagcctcccaacagtcccaaagcttccctaacctcctccatcacctttctactttcaaagaataaaaaccctagcattctgaagccttccgggggatctaggagcattaggagcaaaggctgtccaagaattggagaaggaagcaaggtatggggagtttatgttgaacctagtttgaataataacccttgtttgatgttatttcgctttgtagacagcatgttcaataaaatgtttctaagagttgaaataattgtttagttaagaaatttaattttagtctagtaaataattaatggatgattaacttgaacttaattccatgaatcaaattaggaattaaccgagaattagagaaagaatagttgtcattaagaaaacgactatataagctatgtttctttaaaatttagattatgtagactaagtgtttgatagaatgttataatgaatcactaacataactaggctattttgctgtattcttttactccttattggaggtggtggtaattgtaattaattatttaacctggctgtatgttattaattaaggatacggtatgttgttgctgtaagctatttcattttgttgttgtatcttgtggtggttgataatctaatatggttgtaaattattatgttgctaattatgaggttgctgtatttaattaagattatatgttgctgttgtatatgtggctgtagatgtagctgttgtatattttaaatgggttgctgtctgtttgattttaatgggttgcgttgctgtctgattaattaggttactgtatttaatgttgttgtatgctgttatgaattttatgatgttgtatttaattgggttgctgatatagctgtacgatatgttaatattcacttgatgatgagttttgttgaaattctgtaacaaagatgatttaagagtaaactgctgattatttggtgttccactggagtgggtgggactatctgatatgtattccactggagtgggtggaattagttgatataaaaattgaaataaatgataaagaagaataattaaaccactcatgcattctcatacacatatgcctggcgggggttaatccgtggtgttgatgccttgcgggggttaatccgtggagatgtgtgtcagatagttagaggaactgagtatgagcgtttagacagtgaggagtctgagctggggggtgcttcggcagtgaggaactcacaccacccatgatgatcacatgaagtgtgagtgactttcctgtgcaccactgcgacaccctgactgatcatgcaagttctggaccagtgattggggctatctgactgtggccactgatgatgatgattttgtgataagctgagatctcagtcatgcatcatataaaaagatgagcatgcattataaacattacatgatgaatatactgtatgaattaattcatgtgtcgtgtatctgaggtgatttaatctgtgggtgtatcccctgtgactgttatttttatgaccatccgtatatctattttgttatattttattcaaactatgattgtcataaactcacccgagttgtgtctgtggttgacacctgtgatgaccccaaatcatttgggcgagcagataaacaggaaagcatgagctgtagttgaagattgttgaagaagtttgatgagaagctgtatgttatgatttataattttctgtggcatgtaattgtgataagttgtctgtattattttggatgactgtatctggactatatatattattataattgaaccgtggtgaggaagaactgtgtacgtcacaatcgaatcatttgcaagcaaagcgaaaagcattttcgcgaaaaaattataactaaaaacgttataatacggaaaggatacgaattttcacataaaaacaatcaagcacgggtgagtaaagagaggcgttacagacataccactaggaagtttgatgtaaacttcctccttgaggtcaccatggaggaatgcatttttgacatccatttgatgtagtggccaaaatttggatgcagcaagaacaaggatagtgcacacagtggtcatcttggcaactgaagcaaaagtctcatcatagtctaacccatattgttgcttatttccaagcacaactagtcgcgccttgtaacgatctatggatccatccgaactaagctttatagagaacacgaacttgggaaaagaaccaaaagggtgtttttttaaaaaatatttaccgataaggtgcgttttcaaaaatatatgcaaatctggtgcagaggggccttttatttacaaatctggtgcactgcaacatgcctgatccaggcatgttgcagtcaaccagatttctataaatagcgcccctcgcttcccagttccttcgtgtattggctttccgtggtttttttctctgataaactgccatcattctagtgttttttagttttttcagagattttttaaggtgttgtgagtgaccagggtgtcatagatcgcattgtcttatattggaatggaagaaagtatcaaggtcaacagggtgtcatgtttgaaggggagacacgaggaaccgctgtgagacgcacgtcaaccctgactgaattgcatgagaagatacgacaaaaattacgtctgaatagcaaccagtcaatcactttactgacggggagattatggcaacacgagaagttcatggggtttcaaataatggatgatgaagacgtcgagctggtactagatgcatattgcaaccagggaaggacagattttctggagttgtacgtggatataaccgaagttgaggatgttgttttacccatgcaggcagttccacatcgtagatcatcatacgctgctggagggccatcgcatgctgctggaggtgcctcgtatgctgctgggggggcaccattggttgggggagaggtgaacatgtctcaggaggattcacatgacccaacttgggtcatggatgaagatgaagaggatgacgatgacgaaaatatcgcaatggaagatcggcttcttcaggaggatgctagtgcgtcggatgacgatgaggatgctggtgtgcatcaggaagatgttaatgtcgggccatctgaaactcgtcatcatgcggagggtggttcgagtcaaccagaacaaggtaaattaattaacgatgtgaattagaatgttttgtcatttaatttgttttatattgtttattaatatgctttttaatgtccatttgatgatgttattttgttaggttaaataagtgtatgttgtttactcgaaagtgtgtatgggttagatggtttggttgggttttgggcgttgtgttgggtttagggtttggtttgggtataggtatttctgttgaggtttagggtttgattggtgtttagggtttcggtattcaggtgacggtttatggttgtctatttatttgtagttgatatcgttaattaaactgacgttccatgtgcagctactgaggcgattcctttctagcaaggaatccctcattatacatatattgattggagttacccacccgaacaagactcttttagcggttctggttctggttcgggatcaggatcagtgcagggtccgtggcaactaggggatgatttgtttgtcaaacaagaatttgactcgaaaaaggaagcacaattagcagtcaagcataacttgatgaaggagcatcaagaagcaattgtggttgagagcaggcccgacaagttttccatgaagtgtgttgcgcatactgatggttgcccttggagggttagggttattaaaccagttttccgtgagaaatgggtcgtttcaaaatggggtggaaaacacaattgcttgaatgatcatatttcacagggtcacagacagcttgatgctgacgtaattgcttcactagtcgttggtatgttttaatttactatgatgcattttgaagacatatttgtttgcaaaacatgttgttgatgtaatgttaaatttttattttaggaatgattaaggaggaaccatcagtgtcaatctcattggttcaggaaaggattaccaacacattcggatttaaagtttcttaccgaaaggcctggtatgcgaagcagaaagcaatggcaatggtttacggagactgggtagaatcttatgcattcttgcccaggtggtgtaactacatgcttcgttttgcaccaggttcttattttgatattcagacgaatgattactttgttgctcatcgactggtacgcgcaaagcgcgtgtttcatcgtattttttggacatttggatagtgttgtgaggcatttaaccattgcaagcccatcattcaagtggatgggactcatttatatggcaagtataaaggaaaattgttggttgccacaactcaggatgggaataatgaatgtgttcctttgacatttgccgttgttgagggggagacgctggaggcttggaattacttccattgtgggttatgcgtttattggaacaaacccaaaacgatttcaaattccttctgcatgcaccatggaaagactgaaggctgtcatcaaagaagtcgcgccggttggatttccccctgatgggattcacatgtcacaggtggtgagaaaattgttttttcgacagccacgccatgcacaatattcgaccaccacaatcgattatcagataaaagagttgacaagcgacgaagacgtgttgaagatcatagcagaatcgaactactggaaacgttttggtccaattcaaattttagccatttttagcaaaccaaacatgcagatggaatgagaaatgtgcactgaatatgttgttttacattattgtccttatttcaaatgaacgttctgtttagggtttatcgattcttatttagggtttaggcctgatattgtgattagggttaacgtcttcggttacggacttaggggtaaggttttacataaacttcactaatattgagtaattagttttccaattcaagttttgccttgacaagcacttccttagctgcaatttcctttgcttgtctctcttcactttgcttccttcccacttccttgccaaacacctgcgatgatgatagacagaatcaacctgaataatactaaatcgggctgaggtttgcggtgtttcaacctttgtgttgaattgatgcattccacgacaattataagctaactaatagttacactgcaaaataaataacacaaataaatgtaactgttacatgatagttacgatacacatcatgaaaataaatggtacaaacgaatggtacaagcaagcgactaaaactaagacggtggtggccacggcacatttcgcgcttgtcgatgaggttgcctccgtcttcgaggtcggtgagaactactttcctcaacgggggctgcctgagaggggcctggctgataaggatctggccgatacacgtccgcctcggaatggcctgtctcatacgatgggatataaggagctggatatggagtgccctgatctgcatatactggcattgcaacttcagcagattcaggcacatctggaacatctgatgcccaactcccacaacctgtagtgctcatatgcatatcaaaatccatgagcatctgctcgacgctcgtatgcatccaatcagggggcacattcccaaagccaacatctgcatcgtatgcggccgacggtgtaggcagatccgcagaatagtaggagccgctatggtcagtaggatcatggtagaagacctgactcccatatgtcgacgacacaactggcggcctataataaccaggagcaccaggcccgggagcaacaatgggctgaggcacttgttgaacaggtatccgtcgacgctccagaccacgtccctcccttctgcgacgaccaacttgaagagacaattgtggctcctcctcaagctgcgtatcgggagcttgtggtccagactccaccacctgacaactttgtctgaagacagacattaagcgacccaactcttgatgcgcccaatcaatgtcgaacgttgccctattctgcctgtgtgtggtgaagtagagcatctctatcccatcgacctataaattcaaattcaaatatataaacatcactgtcaactgtgtcaattatcataattaatgtaaacaaaaaaatattaattgaaacgaccgcttctacttcgctttttattacgtatttattttttttatttgctaaaaaattttcgaaaacagaaaggataaaagttccaacgaatttttattgattttaaaaacgaatttagaaattaaggttcaaatgaaaattctgtcgatttaagcacgaatttagaaattgtaagagttttacgcgttatttaaatcatatagtccaaacgctcattcataccaaatattccattcattattacatatccagagtctcatatataaacagtccataatacagcacaagcatagatcatcaaaagcagacaaacagcacatattcttcatcctatcttctcgtacggcatccatatcactgcttttctgctcgcccaaataatttggggtcatcacaggtgtcaaccaccgacacaaataggggttagtcttgataaacaaaatttaaatatcaacagaccaaatgataaatcaaatttaaacatcgacagatcaaatatacgtaaacaattataaaatataaataagtcgtttttacacacagaattgtcatgtaatgcatgctcatcttattatatgatgcatgactgagatctcagcaacgtctaaataattgtggccactgtcagataactccaccctcaccttagtggaacgaacttatccatccagtcagggtagctcagtggcgcgtaggattatcactcccatccatgtgatcatcatggtggtgtggtcctcactgcgtctaccccctagttatatggactcagtttagttatctgacactcctctttatgagagttaacatctcatcatcatcatcatctcataccccactgggtaggtgcacatgaaatgcatgaatgattcattttttttatcttgtaaattattattttatgttcatcacaacttcacagatcctcattcccgtctcatctcaacatctcagagtcatcatcacatgatatacttctcaaatcaaatcaccttgaatcatgtatggatactctttttatcttattttctcatcattcatcacatatgcattcttttaatcacatcaacacgttatgtcttcattgttcactacaacatcattatttgtactcattaatcaagttgtaaacttttatttcttcaatcctatatcacgaatcacacaatatatcacaccacttaatgctcctttccataaatctcggtcattatgccaccataagcatttgaatatagcaacacaaacaacaatttaaatacagcaacagcatgcatacagcattaattaagtacgtcaaacagcttttaaccacgtcaacagcatacagatttatacaattttatttaataacagcatacagattcattaatcatacagatttatttaaccagctttaatttacagcaactatataattttatttacagaattacaaataacaattcaaacatcatcaaaaataaattaacagcatctatagattttacaacaaccacaattatatccctaactaattttagtttctttatgactttcactaggacatactaatttaaagttctcttaactctaattctactatattaaagatgaaactattctaatccaccacttaatgttaaagattaaatcatcccaattaatcatttaaaacaatagtagaataaacgataagtatttaatttaattagggtttcttctccatccaaataaaacgttaaatggtttatcatactagtcttgaagttttcttaaactacactttacttctacaacattagaaattaaactatcataaccaactatccaaaacaatataattttaaacaataaaaagttaagtgcttagcttaattatggttgcttcattcatcccaataacctacctaattaaacttgattctcttaatcttttcttcctcttatacttttacttaattttatcttaattcaagtagttagttagttgaaagtagagattaatttgaggtaagctaatacttaaattctatttagcaagactcccccataccttaattatttcctcaatttgaacaagctagcctcccttggttcctactccacgtgagcttgctcaaagcttggaaggatttcttttggtgcaaatgatagctcaagatgggtacacggttagggctttgtaattccctaaaagctaaaaacaaaaggcaagtagtggggcttaggaaagtgcacagtttggtgccttaaatttttttggagagtgaaggagctgcatggtttgctttgttatttggattcaacaagaattaaataaaactaaggcaagcaagtgggaccatttggagatgcacggctggtccttgtaatttggtttcaagaaaacaaaaacaaaaggcaagggaaggagctgcacggtttctctatttggtggctgacccaattttacttcattcatgtccttatatagcatggtcttattggttgatagtttgaagcccttggtcaacaattgctgcacggttactcaatggcttggaggaattcaatttgatttttgcttccttgcattcaatgtagattcctttggtctaaaaaaatctgcaccatgcttgactttattccttggccattccacgtgatattccattattcaaaggctattcagatttttttccttcctttccaccgtagcaagcttcttggttgccaaataatgcttgcttagtttatgccaaataatttttgctttttgcccaaaaacccgtattaataaaatacttactctgaattggttcaccgttggatcttcatggaattttaaaggcatattcctaacttacatatctagattttgaccgttgggatctttgaaataatgcttaaaaatggctacgtgttccaaggagtgaagtttactacacttttgcatcttacaagctgttaagcctttttcatgaaccaatgaaagttaagcttgacttttcaacccttcaagtggccaaattctttactcttctattcttgtacgttacctttatttcttgaagagcactcatgacttgttgtatgagaattagcttgttgttttcccaaagtcttccattagtcaacatagcttttactacttgatttttattggctaatggtttgaaattttaccactccttgcctccttgacttatcttcacgtgtactcttcatatagaagcattctattcgcttttctttcttatatccacggtcaagacttatttctagggccaaatgtacaaaatttgcctttatttacatagaatggcaatattctgttttcttattgatccttatttgattttaattattaaaatcactaaactaacttatttagacaacttatttctcccataattaagagaaaactccatagattatatttacacttttattataattttttgatacctgaggttgtctagattgagctcttttcagattatcttccaaaatgcctagaaattattgtttagggttttctgacctcaatcatgttaataatatgttgtctaaaagcattttatccaataatgaggttcccacaaatttctaaaatcatttggtcagtgtttgacctgaagggtattttggtaattttacctctcatcctaggggtaaaattgtcatttccacaaatgttcagggaaactctgtaattgtcaccctaagggtattctgatcatttttcaaacatcctagagtacttatagaattttctccttaagataccctgctaagatgcctaggggtattttagtcattcccaaaatgtccaggggcatttccggcattttcctaaatttttctgtactacctccaattagtattttaccctagaaatggactgaaattttggggtgttacattaatgaaaacaaaacttacagtacgacccattttcgcaccctccttggtgataaatcgcttcccattttctttgtaccaaaccatgtactgatggttcggagacatttcgccatggattggggggggggaggtcgatgtgctgctccctttcccgccagcgtttgagaaacggtttgagcttccgcacccagttttcttctcgttttccacgaagtgaaaagtcgtgcacacccttcagcttcatggcaggacatgggatcggctgatccctaccaaactgccgcatgcatctatctggttgggaagcttcaactgtgtggaagcaaattattggcgtcgatgccatccacaacaaccgctcatggtcggatgcaccaatgaaatcgtaatccccatatggttcccagaccacctgcacaaaaaaaaaaattaggttgttttatgtaatgacataaaccacaaatgctaacttccaattaataagcaatcagcatacatacgttctctcgagcgacttgttcgaaggccgtcctatagtacaccaactcgtgcgtcgtaagtttgggcagcgtgttaaacctgtacacaaaataaataacgttaaccattttagtgcttaaatgttaaaattgttatgaattaaacatacagtcacacataccgatgtccaaaatgtgcatgtgggtccgtacgctgtggaatagatggagcaattggtgggaatctcaaccacgcccacgcctgcagcagcatatgacagccaccgatgtccttcttcgatggatctgtacactcgcacaactgtcttaacaaatgtgcaaggacagctgacgcccaactgtattgtccgatctctgagaagtcctcagccaacaatggaaaataacgtgctgccagcatgctacctccagatctatcgcacagcagccatgcgccaagaaggcgggcgatgtgtgcctttgcaaaccggctgacattaacaaaatctttctccaactgaccccaatcgccgaaatgcctatcaaagtaggtcagtcgcagatatccaccgatcagctcggtgtcttcatcaggtgcttcaccgaaaacgtcctcgatcacccccgcccagtcggacaaagtcaatccggtgacggctttgccaaccgtgggcaatcccaagattccagccacatcttgcaaggtgatagtcatctcaccttgtggcatgtggaatgtatgggtctctggcctccatcgctcgaccagagcactaatcaggccaccgtcaatctaaaacaaaatcattaatcaattcacaagtatagttattgttagatcaaatttgattactgatatcaactgttgcatacctgaatatgtcgcatacgtgcgacatgaagaaagccagcgtcacacaacatatcaccaacgacctcaggaatgctgtcatatgttggggcccccgacagcttgccacgtcgagtcttcaatacccgaggatccacgccaccattccacacaacttgtgtaatgtgcgtgcgctgaacacgcctatgcaaagcgccccagttgtacggggtaggcaagacataagatgtcggatcaatcggctcagcctcatgatccgattcagagcggggcaaatcagctccatcaaaatcagccatgttactataacttcatgcacgaaaaaaaattccatgttaaaccatgcaaccaaacccttccccaaccctagcccagacgtcacatacctaccccactgaaccctaaaccttaattatttaaccctttatacaataaccacacattcaccctaaattcaaaatgctaatcattttatccaaacactaaagtctcaaacacctaaacaattttgtatctacctaatttttttgtcatttgctaacctaacatcatttgctaaatcacaagtacatcactaacaatataaataagtaaatcataacaacatgactacaaaaattataacagaggcaaataaagaccagacgcttacttgttcgcaagattttatctgaacaacttgacacttcagcagagcttcgctgcacaaaagaccactgaagaactctagagagaaggcagagcagttttagagagatggtgcaagtcaggaaatgggagggggggccttatttatagaatctggtgtgctgcaacatgcctgatccaggcatgttgcagcacaccagatttgtaaattaaaggcctccctgcaccagatttgcatatattttcgaaaacgcactctatcggtaaatattttttaaaaaaacacccttttggttcttttgcccacgaacttggtgcctaaaggtttaacggatgtgggacatggcactatatcccatgtatgattttcttccaaggcgagaagttcactttcaatagctttcttccaactttcattctccatggcctgtttataagaagaaggaataggaatagatgataatgttgctgccatggaactgatatacctttctgggggcttacgagtgcatgaactatgtcgtaaaggtgttggttttgggtctggttcttgttctggatcaacagccaaggaattatcttgaaagggcctgaggtgtattccccctcattatcagagcgaagaatctggattttggatgagaattggggcctgaacataagcataacaaaatttgaaagtggaaaaaacttcatcttttgaccgtagaaaatagacccaagtgaaacaactataatcgtcaataaaagtgacaaaatatttgtaatgagcatgagatataactggtgccaccccccaaacatcactatggatgatatgaaaaggttgggttacattcgactaatgtgctggaaaaggtaagattttacttttgccaagcttacaaggaatacaatcaaaatgaataacattaagaggtggggtgtgtttatttcctagaaaaccatatttgagcatgtcatggagtacatttgagttgggatgcccaagacgcctatgccacacttggtaatcaacaaaagcagaattacaagagactaaaggaaaagaaagacttggagacaacgagaaatggataggaaaaagacgtccaactttaggccccttcgagatgatcttccccgagtgttgatcgggcacaagacaaccaaactgtgagaaatgaactcgacaattattgtcgactaattgaccaacagagacaagattactagtgagaccaggagcaacaaaaacatcgattaaagatgaagaaatatcaccagttgttgtgataggcaattgatttccatcagcagtttgtatcttgagattccccaaatactttttgatattagtaaggaatctagcattgttggtcatgtggtgggaagccccagaatcaaagtaccaaggggaagaggatttacctgagaaacctaaagcagagaatgatgaaatgatcatttgttgaaccatttcaggggtcaaagttggaacagcagtggtagcattttgcgggacaggtgctggattggcaaaaccgctaggaataacggagtcaattgaggttgtataagctgtggcagttcgccttggacattccttaataatatgtccattctttttgcattagttgcaaaattttgttggacaatttgaagcatagtgtccaaatcgcttgcaacaaaaacattgaacaccactcatgtcatgggtttgtgacttcccttgtgccatatatgcgactagaacaacagatgatttctgttcttcaatgatggactgagtaagaagacgttgttcttcatgcaacaagtcatggaacaggatctctatgcataagattggatcggataccttcaaagtcagttctcaatttcataagaaattggtcccgtttagtagtttcatgaactgtttgtattgaacttagaccttcagaaggcaagtttgtatatactatatcagtgtattcaacccatagattcatgaattgagaataaaaatcagagatggagagactatcctatttaaaggtagctatgttgtgttcaagctggaagcggcgagctgcgttattctgactataaattttcttcaagtaagaccacattgttgctgcaatcttgtaaggtcgaagattcaggacaatgctcgaatcaacagaaccaaggatccaggccatgacttgagcatctttgacttcccatttggcatgatccaccatatgttggtctttgttaggggcaaaagtgttgccatcaacgtgaccccacaactcttttcctttgacaaatattttgaattggaatgcccaaactgagtagtttttgccatggatctaggaaaaataggaataaaaactgagaggataatctggactgagaaacaaatgaccaagaagaacgtgaagaagagtgaaacaagatcaagaaactaggacaaggctgaaaagcaacaggaaaaaacgcaaactaggttctgggatcgtaacctaggctgataccatgtcaaactcagagaagattgggtcaaaaacctgtgctttcctgctggagaattctcatataaatacaaattgattacaatctgtaaagctaattttcagcccactaaataagctaatacagttgattatcctaattaagagaataacagttacaaacatcttttggcattaattctgttgacattgctaggactccaaattcaatgatacaccatattctcttatctggtgcctaatagatatcatgtttcaactaattatatccacttcaaagcatgaaaatttgtatgacaatgatgtaagaatatttgaggtttttttaattaagaaatgttaacgtcttgattgaagatgttaatctaaatacacatttaatcattagcttattaaataaatagaacaagaaattttgtttgtgaattgtacattagttaatcctagaatgaaaatttgtatgaaaaatggtctagcatatttttcagcacgttcaagattgttgtcaacattcatgttcaagcttcaaaacatgattgcttaatatgtgacaattgaatagaaataagttgaatgaatcaaattcaaatattatacaaaatgttgatgaggaaagacgagaattttcaactcacaggacaatttagtcaaaactagaatttctccactaggatcaacaatatgtctagccgctagggtctccattacaattgaccttgctggtaaccatgagttgacatgaaatcgaacactctacaaatgaggagggagttatatcagacaacaaagcaaaacgtaaaacagggaagaaaaaatttaaaaaccacatttctgttaaagttcaaaaagaaagtacacgagtgaagacttacatccagaaactcactaccagcaagagccattgcacgttgaaaggcctcattttctttctcaggtgactgatcaggatctgtccaatctaaatttagccttcctactcttgaggataaatgagtattattcacatatcttggaggttggtctgtatcatactgattgattccattgtctatagcatcaattgcctgatataattaaacaaaaatactattatcacgaacttatacgattagaaacatgttttgcttcactttataataactaaaaccccaaatgcaccattaatcacataagtcattctgcaggcatttatcaaatttacccaacgctacacgtgattaactctgcctgtgtgtccttgcatgcatggtctatcccaagacaggataaaggaggagggttgctatcatgtgaaccttcatgatatttcgttggggcatacccttcatagctacgcattacatcaggtttcgggtgtagcgaaaaatgggctaaggcccttgccacaaggcaaggtgctacattagtccctggatgtagtgataagtgagctagggtccttgccgcatggcaaggtgtcaggtcttcacctagatttggtgacaagaaggccagggtcccaacacataggtgggcgagtgtggcgggtaaacacagcccaggggttaaggatgcaattagcaagaataataaagctttgggaatcgatgacatccttattgaagtgtggagaggcctgagagatgtgacaataaaatggttgatcaatctttccaataagatttatcaaacaaataagatgtctaatgcttggaggaaaattatgtttgtgcctatttacaaaaacaagggagataaccagaattgttctaactatagaggtattaagctcatgaacagtattaagctcatgaaccatattacgaagttgtaggagagagttattaatcatcgcttgagaagggagaccaaagcttttgtaaatcaatctttcagaatgttttggtactctcatcatccacttttgaacctctcctaaatctccttaacccagattttacttaaaatgaagaacataaaaattaaaatgaatcaaaaagaattaaacaaagcaagatcgtacaaaatatagtcggagatagaaaagaagaaaaaaatctactacctccatgaagctcttgtaaacagccaaatatatgtaatgcacatctcggtgttcctcatctaccttaagttctttggctataatctcctttccaaaatgctacgggcagaaagcaaaagtttaatttaattatcaaggtatattcacaattagaataaaattatccacaaacatttggcaattgtaccgaaatagaggaattcacgaccatgtaaatgatataaacaagaagtgataaaacccataaccagaataggtagtttagataagaattttaccttataaacaagaccagcactactcaatttagtggagaaaccatgcccaaaaacttcttcaaatcccttttgatgatgatcataccgatctcgggtagggtcatacactcccccaacatcgagaacagcatcaagaccctccaatacctagagatcaacaatttaagttaaacaaaaactttaaacagatattcgaaacacaaacttccactccattcatttgctaaaaaagtctaactaaaacacatagggcaacaaccaaaaaccaacactagcaacaagataaaaacttaacgcgtctctcctaaatttcctttgcccctcccccacttttgcttcactagctacaactcaatattaaaaaaactccacaaacaaaccaatacaccagcaacttgataagaatcagccttgtccacattttctaaggaaccaaacactgaaacacacacaatcaaaaagtgactaatgtctacattttttgttttgggttctttgacaacattttagcataaaaaaaaaatttccaaacaaatcaataactcactagaccactgataataagtctttaaacttccagaaataaaaataaaaaaaaaacacaatattacagcaaccaaataaagaaaaagagacacacttatcatcaaccaaaaaaaaaacattttttctcattaaccaaactccccaagaaaaagaataaactgtatattgtaaatcacattttctcagcaacaaaataagaaaacacttgataatttttatttggttgagaaggagagagaaatacagaagaaattgtgtgggttccacacctcgcacaacggtaaagttgtgaattggtgacttattggtcataggtttgaatccaaaaacaatttctttgcatatgcaagggtaaggctgcatacaacatctctctgccttacctgcgcatagcttggagcctccaggtaatggactacgaaatttttttttatcgttgttgttttcatcctctaaaccaaacatagcaagctatccatgaaacccatttcgagtctgtgtcacacagacaacctctcccactcatgggatgacattagatagggtcctatagtactcattttcagactcacaggagtagcaactttcccatttccatatccgttggatacttatgtactcatacccacaccctcttactttacttatgtataaaattaataaattaataaaatatgttaattagaaaaattactacaagcaaatctaactctaaagtaatcccaacataacattaaaagcaaccgcacataatactacctctattcttatatataagaaccaattacctaattaatcaagaccaatataaattgttagattagttaatttatcataaattttaatttaattttaagactatccatgacatcaaatggttaaagaggtgattttttttaaagataatcttttttaaccagtaaatatatattgttttgttgatagctcaattagcccttcttcagtcgaaagcccaccaagctagacttcgagtcctagtagatataaggttggtctatggtgaagagagaaggaaagggagagaggttacgtgttcgaatctgctagctaccgaaactaataatactaacaactttttgccaataaaataagtgtccaacttcgataaagaatctgaatccgtgttccaagagagagtgaatgtggatatgcttaaatatgtttttttaatcctaataaatatttgatttttgcgtttcctctctgataattttttgttttgagttgagttacaattttgtaagttcatgataaattactgaattggagaaccaaaacctgaggatctcgagagcaaacgatttcggcgctgttgaatttgttcgtgaggcgaatcatgaaccacgcgcatcagaggcgcgtgaacgggagaccccgaagagaagtagactgtagcttggtttgccatcagaagaagcggaaggagagtagtagtagtgtgtctgcggaattggaattggaattggaattggacgaatggttttgttgctgcagcccacatgccactcttttttccctccacaccaaaacctcaccctactaattttatagggttttagcttaaccgatgtagctgggatttaaaaaaaaaaaaaagaaagaaaaacatgagaagaggaaatgatgtggatgattctagtccattcatttcttttaaaccaagttaaagattgagattgaaaacgcacaaaatatatatagtagttttggatagggatgctaaaaaactagtttttttttttaaaaaataacaataattagttatcatataaaatataatcaattttataattatgagtaatttaaaaaatatttatttatttgaaaagtagtcataattatgaaactataattaattttatagaaatgaatatttcaataacttatttttgttcatttataattaattatgtaatgaattttagatagaacttattatataattaattatataacaaattatttatgcatcaataatttaaaataataacaaattataagaaaaattatatattaataatgtaaaaaattatatatcatttaattataacttattatatatgataaatttattaatttttaaaataatataaataaaaatttatgattgaatgataatataaaattatatgttaaatttatcaaattatacttctatttaaaaattaattatcgttataaaaatatatgatatccatttataatctgattattcattaggggtgaatacagttgagtagatataaaaattaagagcaccctagtttcgggttttgcgtgcgttttcggtgttaaacgacgtgttttcttgcgtttccaatgtcagccttagatttgtttagaagaaaaacgaatgggcatgattcattatttcctcatgtcacttgttttttactttttcacggaattgccacactgactcagcaataatctctgcatgttcttcttcttcacgtcacaatcacagaaacatgcccgtgagagtattggagagccccgcaacaccttcttctcaggtttcaggtaataataaccgtcatttttcatctcatgcgattttctatcttttgtctttggaacaagttctttgttttttttatttttattgttcgattgagttttggttcgattgtgttgtattaggtgctaattcgggaaggcgttcgtgccaatcttgtagtcttctaggcgttgggcaggtacttattatatttcagtgtttttgttttgtttgactttgccaatagagattatgaattggggtctctttgcttaagggaactgcacggaccatctaatacttctataagacaaattgataaaatgtattttttttataaaaataaaataaaataaaataatatttttgggtgatgatcaaagtggtattttgaaattagaattagctactactaccggcctctgatgatggtaattagtatggccgtatgggtatctaaggcgtcattcattgggcgaatggggttcagcacgaattgagtgtcaacggcaacagtagatgcttgtttgtactttatgcatgttatgattccacctgttggaagattgatttgtagtcagttccacactataaagcatagactctgacaccggacaagacacgcataaggatattttgacatgactaatgtagaatgtaggatatggaaacatcgcatacacaaacaaatcaagattctaattaaatgaaacatgagtattatataataaaatatttaaattgatgatatattcatctttttaaatcaatcttgtatgtttttttaagtatattaattgtgtaaaagtaacgacttaagtgttcatatcaacaaaaaataatttttaaatcaagtaacgacttaagtgtcgagcaagtactcggatgagtcgtgttggaaacgtatccaacatggcaatatttagaataagagaggtgttcgtgcttgaccttcaattgaaacagttgcacattaataatcacactaataagcacattggatcctttttccattatcatctttgcaccaaaccatacaatgaaagcattactgctgaaaataacaaaataacccaagcctagacccactccagctatagaaccttcatgaattcctgatttgtaagcatctacaagaaatttgttcaaaccagatactgcttgcttttccccagtaaaggaagcaacctgaaaatagacacggagagagaaaatacaattatcatggcactgcaagacataagcagcaagaaataagcacacacatgaccgagccaatcgtctgttcaattacatttgtagcttttgcataagttgtttgacctcaagatgccatcctgcctatgatgacagctataacagcaccgaacacaagaagtggaagagcagcaacatgccaacagtgagaagcggccctttgacaaatgcttcacaaatctcacaatgagtgttgctattagcagaagtttcccaacctgttcagaaaagcaaatgttcagcatatttgcattcatgcctacaaattttagctcttgccacatatcatacctgcaacatttctccgtcctcatcatcaggctgcagccatctcatcattgagctaccctgcgtgtaaataataatcaacacaacaaatatttgtcacaaaatcatcaaatagagaatctccaaatatatctgatagtggaatcttctcagaatctatctccctggaggtttgtgacaagggggaatgtcctttagtgtaggaggaatccagagaattaagagagaagagtcagagcacacttttcagggtaaattcattgatgcctcatttcatttctcatcattacaaataaagtgtccaccagcctaatcaaggatatgtgtctactatccaggcactactccataacagaaaaggaatctagtaacaaattattattctaaaatatgtaaggaaaatattcctatgtggcagagaatacctatataatctttcatccatttacaatataataaaaggaatgttatcagaattcagaaagtaatcggatccaggtaatatcttttacagaggatatcagaatcgttcacaatggagttaggatatcatcttagttcttattcaaatccttgaaatactttaaaatgcaaaatcagtactaggcccttacttgaaactcaacaaatatttactaacatgataatcaaccatatacaaagtaaaacagctaaatattttattactttgtctaaaatctcagtttcatacttatcgatccgaccagtaatcatagaagggggtaaataaattgaatcagaataacaataggaacagacatgtcatcgttttttaaattcatgaaagtataaaggactcatcattgatgccaaccacagtaaaaatgttttagcagcaaaagtcagtccacatccacacaataagaatggtcaatgtcttgaagtgtgattctccccatgtacaaatcatttacatgatcagtacagagagggaggcacttacggtttaggctttcatgaattactcccatcccttgtacccatttttctttatccaatgggctgacattcaatctgttttgcagcaaatggacccgataaaagactgtagttatcttgtcaccaaggttgttgaatcagaatacatatcatgaatcgttcagctatttttttgtatagtgaaccgtattgaatcgtaaaatttaaaaacaaattaagaaaaacttaaaaatgtataatactatataaatccaaattaaaaaaaaaaatcaaataccaaaatatataagtaaccaaatctaaaaccagttattctcatattaattaaatttcaaaactaatattatcactactatcactatcagcatctagtattgcaatatctagtccttcatcctcttcattagtagagtcatttgactcatctcccacatcttgtttaacaatttgaagatccttttctgttattaatcctgttgacattatcttgtatgaagatgcctttgcctttatcatttttgtcaacttgaagattttgaggacctaaaaatatacataatgtaaataaatatattataaggtatttgattagaaaaaaaaaagattatatatgcaaatatacctctctttctcttttttctttgctcttcttaatcaacgtcgaagcactcatgaacatccatccaagattccttatccattaggcaaggctcttcttgcttagtaattcattccttatcagaatctaaatctgataaacagataggatcatatgtgtctcctttttcctccctttgtttttgcctagtttcaagttgaaggttgtatttaacaaacacaagagcattcaacctttgttgctctaaacggtttcttctcttagagtgaatttgatctaacacactccaatttctctcgcaccctatagcactgcaagtgaggcttaggatacgaataactattgtttgcaactctttgcagtcatctccaaaactattccaccataaagctagcaaaacaaataataattgataaataaatatttggttgatgacttaatttttaatttttaaaaaagtcaaaacatcaatttaatcaataaacaaaattaaatgattatcaggttgctttctagctctagttgcaattgctaaactatttccaaataatccttcagcactatcaactttctcaatttgagaatcaattgtgatccttgtttcaatatcaagacacatcttctccagtgtcttccataagccagttttaacctcacgatctgagttaaactttgagtcatagtggaacctatataattattataaatttagaataaggcttaataataaatcaaatatcaaatataaataattttataaaaaaaatttataaaaaaaatacttactttgaattaagaaaatatgttgatgcatgaagaggcctatgaagttgtaaatcccaacgcttgtcaatgattttccatacatccttatatctcttttcctcgtgattaaaactctttgttatttcttactttgctctatccatagcctcataaatgtatcccatcacaggttttgaatcaccatccacaagtttgagaactttcacaagaggagacacaattttcaagcaataaactattgattttcaaaaccttttatcagccagaacaacattttttgcaaatttggcttctggcctagaggaataagcattattaacccatttttcagatgtaaacatagatcaaagtgctatgttttgtttgaaaattgactgcattgtcaaatatgatgtagcaaaccttgttattgctggcctagctaactctttacctttggaaaaggttctatataaattcaacacccatgtgtgcctataaatgaaagttgtgattttctttgctttccaaatggtattatagaacactgtaatgccaccaatgtcttctaaaatcaaatcaagacaatgggctgcacagggtgactagaagagttgctttcttttatccatcaacttttgtcctgcagatacaaggactgaagcactatttgtcactacttgaacgacattctcttctccaattttcatccccatctcatcaagtaattaaaacattttttcagcatctttataaaactgcttgtatcaatagattttataaaaacagtccctctagaactattaacaagaaaattagtaagagatctaccttttccatcagtccatccatctaacatcaatgtacaactagttttttttcactccagcttatatttatccaaactagcatggacaagatcaacttctttcttcaaatatgacaccctcacttcatgataagatggtggttttatgcctctaccatattcactaatagatctcaccatattaataaataatggactctttactaaattaaatggcaatgcattgccatatatgcatctacaaatatcccgaaccaccaaatctctatccttaatcattgaatttatagtttgtcgtttcatagaagatgagtcacctccactttttccttttatcataaaattattcatgcttcctttttttgtgaatctttatcatcaaagcactctagttcaccatctttgcttgcatcctctaatattttttttttaaatatatctcttacgtcttccggcacttgttggcttggagcaacttctttgtgtgttccagcaagatgatgcttcattctaaatgctcctccccacattgttttttgacaatagttatatttaacattcaacctattgccaagggacttacaatgatatcaggttatatccttttctttttgagattttttctttggagccatttttgttgtttctgtgttagagaaaaaaataattaaatatataataagcatatcaactttacagtttgcactttaatttaatataaaataaaaataatagctcatcccatatccatatacatagctatatacatatccatattcagtctctcaaaatgaatataaattaataacattttattaaaatatattataatacaatatactgaatatagcttaaactttaaaaattttaaaaggctggataaatcacgtctgtgatgtagtgaatacaaccagcataaatttagtgaatacattatagggatttttttattaaaatatattatattataattcaaaagttttgaagcactatgtaggaacgtactctgcaactcataaagataaagttgtataccatcagtttagtccatcacacaaagacaacacataactacagctgtaactcaaaaatactttataatattttaatttcaaaaagctcacattaaacatactcttcttcttcaactaaagtggcttcttttcaactctgcaatcactgcatcccttaaggtatgcttctcctctacaacttctctgttcatcactgcgtcgttgcttcttctttgcaacttctctttctgctagttgcttcttctctgcaacttctctgtgtcactgtgttgcctttcttctctgtgcgtcactgcattgcctttcttctcgatttcttttttctttgtattcttttcgattttatcttccaactccgcgactctttggattacatttttttatcttccaactccacgactgctggttttctttttttaaaatttgaattggaaacattcaacgattcacagttcagttttgaatcgtacgattttacgatttaatgttgcgcttcaactcaaaaacgatttagtggtccggttcgtatcgtttttggcctgtatcagatcgaatcgcacgatacgtatagtgtatcgtgtgataataacaacactgcttgtcacagaaatgggcaatgcaatgagatagaggctcatcagatgccaaccttactacagccaaagataaagccccgtctactggttttggatcagaaagatttatatctcccatcatcttaacctctctttctgtaggaaaatgcatttcatgatttccattcatatcatagactttgaaatctttgctaaaatgctttatcacttcatgcttggtggattcatacttctctactaatgtcaagatacaagagaaccttaaatgataagttacaatagttttgattgtcttgaagttatggcgacaacaaaataatcaagccaccttcttgttatgccggcataccacttgataatatcgacatcctcaagtgcaacaagaaactcaattggccttggacgacctatatgatttgtaaacccaaccaacttcacagcctttcttataagtatttctgatgcctcaactttcatacagagctttgtcaaatcctcaactattccttttgaataattttgttcctcttcttcctttactcttctttcttcttcctctatcgccttcctagcttttataggattcaaatgtttatctacctgctcttggaacttatcataagcatcaacaagctcaggtggtaattgatttctaatgtgtctcaactgcaagaaatcgccagctaataaacttcgatgccattcttgagactcatctatattcccctagaattcttgcactacttcatcatcccaagatctaaaagtttctcggaca

SEQ ID NO: 2 - DNA, 15744 bp, Glycine tomentella
atggttttgcccttcttcacctttccgagacaacaattaattttccttttattggttaaaatggttttgcccttcgtcccctttccgagaccaatgagaccagcaggagcaatgaacaacagaaagtatgaagtgtttatgagcttcagaggagaagacacgcgtgctactttcacttcacatctctatgcggctcttcaaaatgccggaatcattgtttttaaggatgacgaatcacttccaaggggagatcagatctcagactcactgctgctagcaatcgaacaatctcaaatttctgttgttgttttctcaacaaattacgcagattcgcagtggtgtctacaagagttggagaaaataatgtattgtcgaggaaccatagggcaggtggttctgccagtgttctatgatgttgatccttctcaagtccgcaatcaaactggccactttggagaatcatttgaaaacctttccaacaggattttaaaagatgatcacgagaaaacgatcggagagggtgaatctgataaggaatatatgaagagcagggttttcataagtcgttggaggaaggtactgcgtgaggctggtggcatctcaggggttgtagttctaaattccaggtaattaagttaccacttgctgctttatcagaattttattttatgaaatattctacattttcactatttttagtttgtatatacaaactgagctagattcgggagctttgagtctttaaagcatttcttactgttctgtatgattcctagaacacaaatgtacagtacaaaagtaccgttgggttgctatttgatcactctaattctgcaactatgagaatatcaatggtgactgatatctcacggttgatgatcactgagatacacgaaattggggttgggtgtgtgctcagtgtaattgaaagagagaaagctagaatgtgtgtgtttgtgtgtacctttctccatggaggacgtccctatttataactttaataacactgacctgagttagttgagtagtgagcctcatccattatctgtatatggagattgactgatagtggatttagtggctataaggttgttatctccactaccttcggttatctgaataactgataagtgggtagttataatatttgtcatatcttcctatcctttgatgattaagatattaggcatttgaattaataagataaatgagccttttatttttggccaagggaaattaccataacacttacaaaggaagatatttagcctaaaaaaatagaaaatatttaaaaatgaaacaaagaggaaatatatatggcatagtttaagtaattacggtaatcaagcgtttataaaaaaaacataaacttaaatttgaaattaactagtagtaattataattaattaattagtggatttggctacgaagtatcttaaatctgaaatacctgtgaacaattaatttttacctataatcatcaaaaggttacaccaaaaattaaatttgtgcaatatatatatatatataggatcagccatgatcgacaaaatactaatctataaacggatattaattctatatattacatagtagttttggaattcaaaataattactttatggataaaatcaaaataataaatagtttcataatgaatataaatcatgatgtgaaattaaaacttatatataatcttgataaaaaagtatgaagattagtaaaataagttagaagaattttgaaagataataagaagtgtttagtttataggagtttcaactaatggctggtccttcattcaatcatctatttataatacaaggatagtatccaaattccatagtcgtctggattacaaacgatgagatttagaaaagcaaactaaagtgtttgacaaactttttacaaatgtccattacaaactttagaaggaatcttaaaacagtaaacataaatcatttacatttacactttctattggttattgagtcttgtcgacaattcttattagttatcgagtcttgccgacaatttttattggtcttgagtatattatgataattcttctttgataaagtagtaacacatatcctgtttttctgataaggattcgtgctcgtattactaccttcaccttttattgctttttgtcttggcttctcatcatataaagtctctcttcaaattcatcttgagaggtagttattgctaattctacctaggcatgacaacagggtgggtcggttattgcattccctgtccccatctccgacttaaaacctgcccccaatcttcgcccccgcccccaatccccgtcgggttttaaaacccatacccattcccatacccgctggggttgggttttcctcgtcctgtcctgccctcgcttgttatttgattaaaatttaaaaaaaattaaaaaatgatataattttttttattgaaaaattggacgaaaagactaattacataacaaaaaataataataacaaacccacattcaaaatatgggatcataattttaaaattacaaaacaaaattaattaatttaattaaaaaaattacaaaataatatctttttatttttattttttaatattttttattgcgggacggggatgggggtgggggcaggtatcagtaatctcatacccgtccccgccccgcttttggctatcggggaaaatccagacccgaacccgataaacttggttttttctcattaaaatcgggatggattcgggtgtatattcatgagttcgggttccgctgccatgtctaattctaccataaatgactttttgagccaagaattgggcttctttatcagcttcatcatctattggactttggggaattttattaattagtccattgtactaattttcccttgctaattaaagcaatatcaaatttcttccaccacttcacttttatttgtcttgacaataactggatgtctatgatgtcatccaatcttgaataggtataagttcagcacataatcaaggttattccttgtgatgccaccaaggatataaatttgtagctgtatatggaagtagtctgcttcttgaaaaattgatacatctattctatatgaagggaaaagagctcttgatggaccaaagtccaaaatccatcttatgaatcatttggggaattttaaagatatttcttttttaaaccagataaaccaagaatgtttacgaggtttaaagtataaaactttatttgagacttccatgtaatcaaagtaattatagtatgttggaagaaaggatcttgaaaatgattatattatgtatttgttcataagttaaaccatcaaatgttataggcatagggaaatatcttactaaattttctctaacctcttcaacaaataattttggttatcctactaccaatttttcttttcaaaatcctgcaaattcaagttctcttaaggttacttttgataaaaaaaaaaaaaagtatctttatatcatctataatataacattgttggacaatatagattagttaattggtttgttactctttaaaaatattagggtctcctataaaattttgtattattgagtatataagagtagatattgcatcttcttcttgggtttctgtttttacactacctaatattatagttctatcactttcggtacacaatttattccaccatccttataattgtcttgtaaacccttggactaaggttataactgcatttctatatgaggtattgaggttccttttgttttatatgcagttgttgccattggcatttgacaagttaaatctaaaatttgttcactcatgccatctaaattccattctgcgatggcagatcctgagaaaacattttgaactaatccaccccattcttcaagtcgaacatttgccggtggtggtcttgaataataatttataagtttgggatatctctatatcttatttatttctacatcttcttgtagagtattaacaaaaaaaaattctatacttaaattttctagattttttctaatctcttctattttattctctgtttgacttcctaattttattgaatttaaatctttttgcgatacattcattagtttaaatgtgttgacatagtatttaacattatattagagtaatttaattgatgatgtaattttctgatatctcttatttctacgggttcattttcttctataaccccaggaactggtaaagagtgagaattacaaatagtagaaatagaaatttcattacatgatcaatagctacaataagaaagagtgaagtttataaacaacagagtatattttcaacatgaagagatgaaatacatgttttagaatatagctatcctggaactgaaaacaataaaataataattctcttagaacaatccatactagatgaacatatcaaactagattattttatccatttaggattaatacaagtcgtagcgaaacctaattatagattaggaataaatagcccaatattaatgttattaagagacattagacttaaacaatttaatgattcaataatagcgatattagagagtaaccttcatgatggcccaaccttttttaattgtttttctaattttgcaatgaattaactagtaaacctataaaattatatgttaagataccagatgaagttgtagcatatggagcagtacaaataatttttaggatatattataaagtaactaagatagattataattttagagctttaagatcatctcctaaagatgaaaccatattggtagaagccaatattagaaaatcctcaataaaagtacccaaaaggttaagacatgaagaaataattaacaaaatttcagaaaatgatgataaaagatttaatactagaaccaagaatatataatactcaagtaagagaaattatccaagaagatccagatattagattgaaaatgaatagatcacaatctttaagaataaatcaaccccaaattattttgttagtgatccaccatagatttagatctaacatgattagataatagtaatccaaaaatatatatacttgtatattaggagattgaggcatcccctcaatattctccaacatgatcacaaatattacataatttaactagagaaatagttccttttaagatagataaagattgaattagacaagattttatgggagaacataataaaggatatagaaagtgatactttaaaacgtatagcaaagaaggaacaaaaaaatttagagaagaatattacaatcataaggaagaaattgaaattaatatattattttttgattgttttttttaataaaaaagaaataagtataaaccctattacaaaaactaatataaaatggaaaacaacatatgataaaatataagaataagaagaaactagtagttctttgtctagatttactaaagaaaattattgcttaggtgcataaatgtgtacgtgtaaagattataaaactattaatatgtcaactagaaaacaaactactactttgataactataatagaaaaattggaagattctcctattagagaagagtttatacaacaacttaacaatttaatgaaaaaagataaaataaatagagaataaataaaacctatagagatgagagaaatttataatagattttgacaagcaaaagaacaagtaaccattaaagatttacaagaagaaattaaacttcttaatatgaagtaaaagaattaaggcaaaataacatagctttataatatagactattagaaatagaaggaaaagaaatcttaagaactcaagaaaatactccaggtacttctaaaattaatgggaacaagttaaaaaagataattcagaaaacacttatcttaacttattaagtttaataactactcataaatggaattgtgaaattacattagtaataaaagaagaaaaatttaatatgataacattaatagattcagaaacatatgtaaattgcatacaagaaggattaataccaacaaaatattatgaaaaatcaacagaaaaatatctagtgcaaatggatctaaaatgaatatcgaatataaattatcaaaaatgcaaagatttttaaaaataaaatatgttataatacttcttacgtattaataaaaatgtgaaataatactaggattaataactgagattttaggataacaagtaacttttcataaaaccacctagaagtaaacaattaaatttattaaaagaattctcaataagtataatagatacaaagataaaacatattaatatgttaaataaagaaatacaatttaaaaaaaaataaaagaacaattaaataataaaaatataaaagcaaagaaatcttagttagacaaaaaaattaagaaagaattttgtgaaacaaatccaatagctttttggcattgaaagaaatatgaaatatctctatcttatattgataattttaatgaaaaaaaatatgatgaaaaaagctagatctatataaatgaataaaaaatatttagaatattgtaaaaaagaaattaatgaatatcttgataaagggttaataagaacagcaaaatccctttggagttgtttagacttttatgtatgaaagcctcagaagtggaaagaggtgcttctagattgatcattaattataaatctcttaataaagttttaaaatggatgattaggtatccattacccaataagaatgatttaattaaaagattaaataattctttaatattcttcaaatttgatatgaaatcaggatattatcaaatttcggtgaggaaggaagataaatacaaatcagattttgtagtaccttttggacattacaaatggaatgcaatgccattaaaaaatgcaccaagtaaataccaaaacattatgaatgatatattttataaatattcaaaattcacaatagtttatttagatgatatcttagttttctcaaaaactataaaccaacacatatagaacatttagaaatatttattacaattgtgaaagaaaatggtttagtagtatctgaaagaaaaataaaaatattggaaacaaaaataagatttttaggatatgaaatatatcaaggtgctattatccaaatacaaagattgattgaatttacagaaaaattctcagatgagataaaagataaaaaccaattacaaagaattttagaatgtattgattatatagctaattttattcccaacattagaataatatgtgcaccattatacaatagacttaagaaaacccctccggtttggattgaagaaatgacttaagttgtgagagaaattaaatagataaccaagaaacttccatgtttaggcataccagacttataagccttttttatagtaggaatagatgcatcagatttaggttatggagatatccataaacaaataatatcccaagattcaaaagattaggttgttagatatcattctagtatctggcatctcgctcaacaaaaatattctaccatcaagaaagaaatactttcaatagttttatgtttagaaaaattccaagatgatttatttaataaaatgtttttaattagaactgattgtaaaacagctccatctgttttacaaaaagatgtaaaaaatctagtttctaaacatatatttgccagttgtcagtctttattatcttgttttgattttgatacataacatataaaaggagataagaattttcttccagatttttaaacaagagaattttatcaaggttcaacatgagtcgtaaaaccaatattagtaccaaagctacaacaaaagatcaacatggacccccactgggtacgaatacagagaaacaatcaatacaacctttggtgaatactagtacatccagaatgttaaccaaccccaacattagacccaacatatattatcacatgttgtgagaggtatttctccatcaaacagatatactccccttcaatacattaatcctctagtaggacctagagattttgagagagccaatactttacagactttccaaacagataccaaatcacatccaggctatattagaaaagagactgttatgctattaatggtagtagaaaaacattggataaaactatctcatgtagatttagctaacaagatttttcctcaagaaatcaatatcctatgacccatgacaaaaaaatagaacattttatgagatcatcttagtggatactggttccattgagatttcgcataataaacatagcaatggaataatacaattctcaaaaatcaagatttgaagagttttatctgacattgattggggacagcctttgtacacctcaaaatcattttcaagatcctttcttccaacaaactataattactttgattacatggaagcctggaataaagtgttataatttaagcctgataaacattcttggtttatctagtttaaaaaaggaatatctttaaaatttcccaaatggttcattagatggtttttggactttaatccaacaagagctcttttccttccaacagaagaagagatgtatcaattttttcaagaagcaaactactttcatagacagctataaatttatatcctttgtggcatcacaaggaataatctggattatgtgttggacttatacctattcaagattggatgacatcacatcatccatttattgtcaagacaaataaaagtgcagtggtggaagaaatttgatattactttaattagcaaggagaaattagtccaatgggctaaaattaataaaattccccaaaatctaatagatgatgaggctctattcttggttcagaaaagtcaaatcatggcagaattagtaaaagatgaaggtagtggtacgagcacgaatccttatcagaaaaatatggatatacttgactactttatcaaagaagaattatcagaataaactcaagaccaataaaaggtgtcaacaagactcgataaccaataagaagtgtcggcaagactcaataaccaatagaaagtgtcggtataccagaaaatgtaaattatttatgtttattgttttgagattccttctgaagtttgtaatgaccagctgtaaaaattttgtcggccactttagtttgcttttctgaatcttttcatttgtaatctagaagactctggatactatctttgtattataaatagatgattgaatgaaggaggagcagttgaaactcatacaaactaaactcttcttaatatctttcaaaattctccagctcattttcctaatcttcatactttttgcctgtcaagatcatatctaagtaagttttactttcaatatcaagatttatattcattatggaactatctattattctgattttatccataaagtaattattttttaattctgaaactactttgtactatatagaattaatatccgtttatagatgtgtacacacacacacatacacacacacacacatatatatatatatatatgaggagaccaacaacgattgacacaagtggtagtaagttgggttccctaaccaaatgatccatggtttaaatcttgattgatcattgggtatgaaataaattgtattggaaggccgtagccagcccctgaattatccagtatcaattatcaataatggcttgatattctactttacttaatatttttaggaaatcaaataaatgtttcttgaagtagcaaaagaataagagatcctttgttcttgtttataaaaaatttttttagaaacaaatgaaaacacgtttggtaaaagtaatttatgaaaactatttaaaaaacccattttatcttgtttggattagcttcaagtgagaaataatcaattgtttttttgacggtgaaggtaaagcaacaaatagttgcttctacttttgtatggtatcactatgattttgttttgtagaattaattcttgttgttactctcacattcttcatttaaaagaatgttttgtgaattgttcaacatgaatacttttttgttatataatttttttgaaaaatggtagcaagaaccatgcattatatgaaactaatggagtatcacacttttgtccaactatgatttttttatgcaaatttccctatgattttaatttgatgcttatatgctgacatcttgttttttcccaataggaatgaaagtgagactataaaaaacattgttgaaaatgttacacgtttgttagacaagatagagttgccccttgtcgataatccagtgggagtagaatctcgagtacaagacatgattgagctactagacctaaaccacaaactaccaaattcaaatgatgttttgctattaggaatgtggggaatgggaggcattggtaaaacaaccattgcaaaagccatttacaataagattggccgcaattttgagggaaggagcttccttgaacaaattggggaacattggaggcaagacgcaattcgtttccaagaacaacttctatttgatatctacaaagaaacgaaaagaaagatacataatgttgaattaggaaaacatgctttgaaggaaagactttgcagtaaaagggtatttcttgtacttgatgatgtgaatgacgtggagcaattgagtgctttgtgtggaagtcgcgaatggtttggttcagggagtagaataatcatcactactagagataagcatattcttagaggggatagagttgacaaagtgtacataatgaaaggaatggataaaagtgagtctattgagctttttagttggcatgcattcaagcaagcaagtccaagagaaggttttactgaactttcaaataatgtaattgcatattctgggggtttgccactagctcttacagtccttggttgtcatttgtttgatatgaagataatagaatggaaggctgtattagacaaacttaagagaattcctcatgatcaagtacaaaagaagttaaaaataagctatgatggtttaagtgatgatacagagagagacatattccttgatatagcttgtttctttattggaatggatcggaatgatgctatatgtatcttaaatggttgtggacttttcgcagaaaatggaatacgtgttcttgtagagcgaagtcttgtaactattgatgataagaacaaacttggaatgcatgatttgctacgagacatgggaagagaaatcattcgtgcaaaatcaccaaaggatcttgaggagcgtagcaggttatggtttaatgaggatgtgattgatgtattatcaaaaaaaactgtaagactttcattcattgctttcggatttaaaatttctaaagtcaaaggaaataaaatacacacaagttagttattaacattcatttgtatgaatgattgtcacagaaactttaaaaattagtttgtttgtgaatttttttatgcttcctagcttccattaacaaatgatagattccttcgtgagatttttagttaccttgtatctttaagctggcatactttaccattttgtttttcttgtcatagggaacgaaaaccattgagggtctggctttgaagttaccattaactaattcaaattgttttagcactgaagcatttaaggatatgaagaaactcagattgcttcaacttgctggtgtacaacttgatggagattttgaatatctttccaaagatcttagatggctttgttggcatggatttcctttaaaattcatacccaaaaactttcatcaaggaagtctagtttccatcgagttagaaaacagtaatgttaaacttgtatggaaagagccccaggtattaatttagttttggcatttcatgaattgttttcccttttctaatttatggatgcattttaaattaagtgtctcaaatattaacattatgtcattacatggtacttttagacataaatttcatctatgattttctttttagtctctcttatattgcaattacttttagtaaaactttacaaaatgtagtcaagctatcaagtatattattagttatgatggaacattagctcttctaacttttcttttggagaggaagctcttctaacttttaaacttatggtattgccaactttttccaaaaatttagtatatgggaaaaatgtttgtttcactttaaatgtaagattatctaatcaaattacttcccctaactgtaaatcaaaattcaatatcatggagattatctagtcaaatgaattttatttgtttattatcttatttgaaagctctttttcaacccaaaagatgaagcacatgtctattttgtttactataaatttacataaaacctcttgtgaaaaactttaatgtaatgaaataaaggaggtaagaattgcaatattgactactggattaaagaagctataattcaaattttaaaacatatctatcatcccaaatttaaactctctttgaatgctcataaagaacttttaatagtttgtgataaatataaacacaaatgtagccttaatggatgacgttgaaaggcttgtgttgctagtaaaaaaatgatagtacatgaatataaatatttaacttttttacttgaaaggtttgtgacacaccgtaattgctttcatgtatttgttaaaaagtatatcgaatttttatatatggtatttattttcttgcagttgatggagaaattgaaaattctcaatcttagtcattctcataatttaacacagaccccagacttttccaatttgcctaatctggaaaagctagtgctgatagattgtccaaggttgtttgaggtctcccataccgttggacatctcaataaaattcttatgataaatttgaaagattgtattagccttcgtagccttccaaaaagtatctacaagttgaaatctcttaaaacactcattctctctggatgtttgaagattgacaagttggaagaggacttggaacaaatggagtctttgacgacccttattgcagataacactgcaataaccaaagtgcccttttcaatagtaacatcaaaaagcattggatacatttctttgtgcggctatgaaggattctcacgtgatgtgtttccttctattatttggtcttggatgtcaccaatgagtagtctctcgtcccacattcaaacattcgcaggcatgtcatctcctatttctgtacatgtggctaataatagttccaataatctattatctattttcgaggacattcaaaagcttcgaagtctttgggtagagtgtggaactaaacgtcaactatctcaagaaagaaccatcattttggatgctttatatgccacaaattctaaaggattggaatcaattgcaacaacatcacaattaccaaatgtgaatgcttctactttaattgaatgcagcaatcaagttcacatttcaggatcaaaagattcgttgacatctcttttaattcaaatgggaatgagttgccaaatcgcccataatcttaaacaaaatattttacaggtttcactctctttctctctttcaagtatccaattttatggtttccctctttctctcccacacacacatggaagatgaatatttttatggttatgatattggacaccccactattttatgcgcaattaatacatcatttatctgtatctcttcctattacatcttatcacctatcatacctatatttttctcatttttcttcctctcataggtgtcatgagtgtccaataatcatttttgttatttttaatatataaactatatgtgaaatgtatatatcctgtcagtataaaatattaaaaaatataaaaatgagatcttaaccaccttactttaaaacggtcatacacaccaacatagatgcttttcacactataatcatgcattttgctactaattattggctccgcttaattatatgcataagaattattttttacttaattgggtggatacgtgatgatgatcaacaaaaagaactcatagaaagaaactcttggttagtaatatatattaaagaatcaaaagttatgatttagtaattaaaaatgtattccataatcattactttaatttccaaataattctatagaaaccttttcttatcaaattgataacatagacctctttctcgttcatattactaggctacatatataactagaagtataacgtaggatttactattttttccataaaaatgtacaaatgatgataatttgcaccaatagaacattcttgaaataggtatactactatattaactccttaggagattagtattagtctattcatccttccggaaagaacaagaaatccataaatccgaaaattttacacgagttaaatgtagtcctactaacatgatttgtatataatttgttttatcatttaactaaaataatcttcaaattgcatatcttaatgagtggtataatttgttattaggatttgctaacttacactcacttgtgtttttataagaactaaatttataaattaccccttaggtgtattttaaaaattttgtatttatagtttgctaggttgcttcttttaaaagataactaaatataagttagcaaatcctatatacacttgctaacatacactcacactcacttgttttataaaaggagtaagtaagcaagttacaccttgggtgtctattaaaaaatttaaagttataacttgttaactttctcctagaaaataagtgggtgtaagttaacaaatttttcagttattatcacaatataattttcaaattaaattgagagtgttctctttaaattaaattgatgagtgttctctcagtttttcattttttaaattggtatggtatttttgagttgggctgcttatagtttttgtttaaataacccaagcaaccaaatatttatatgcataacttgaaattagctatttctctacaagcaatcatcatttagaataattaccaatactcaaaagatgtgtttttatattgatgggaaaatgagttattattttgctatatctttaattgttgagctaattgtaaggtgatagtaatttattgttcaaaagacttttgagcatatagatttcatttttacagaatgtgaatactagtgagaacggtggttgtttgctccccggtgatagttatccagattggttaactttccatggagaagattcttctgtgatttttgaaatccctcaagtgaacaaacgtaacttgaagacaatgatgtgccatgtccattattcttccccagtcaatatagcaacagatggcttgaaaaatttgttggtgataaatcacacaaagaccaccattcagctttacaagagtgatgcattagcctccttagaagacgaggagtggcaaagggtattatcaaatatagagcctggtaacaaagtggaaattgttgttgtttttgggagcaggttaactgttgttaacaagaccacgatttatctcatatatgagccaatgaatgaaaaaatggagcactgccatgcaccaaataatggtgatgaaaatgtatgtgctgacaggtcaatctctcctcaaggggaattcaaggatgacgtagggtgtgtttcagtaaaaagagtaattaagtgcttattgaataagtgcttatcatgtaaaagctttactgcaaaatcagaaaagaagaaaagtcaagtaaggttaaaagatggtgaaaggctgtcaggtcaaacttga

SEQ ID NO: 3 - DNA, 7725 bp, Glycine tomentella
aaactttcaattactttttaacttttcaactactaacttataagtttttaatttatcaaacataatttagactaaaaaaacaagtttttaacattttttgacatattatttaaaatgttagaatctaacttgtaattttatttttatatttattcccttttattatatttctttttaaaaaaatttatttaaggtaaaatttattatttttatcccttttttacatatgacaggactttatcatttcttcctttttattacgatattgaaaatggtatataataagtttatgtagtttttatttatttatttttggataatttataaataaaaatcacaacaattaatttttaaacgcgcatttctttggtccaggactttggtcacaacaataactgataattaactattaaaatattagcaatgaggtgggtttttataccgtgtattttaaaatttttaatttgacggaatattcttagcaatgcttataggttaaaatggttttgcccttcttcacctttccgagacaacaattaattttccttttattggttaaaatggttttgcccttcgtcccctttccgagaccaatgagaccagcaggagcaatgaacaacagaaagtatgaagtgtttatgagcttcagaggagaagacacgcgtgctactttcacttcacatctctatgcggctcttcaaaatgccggaatcattgtttttaaggatgacgaatcacttccaaggggagatcagatctcagactcactgctgctagcaatcgaacaatctcaaatttctgttgttgttttctcaacaaattacgcagattcgcagtggtgtctacaagagttggagaaaataatgtattgtcgaggaaccatagggcaggtggttctgccagtgttctatgatgttgatccttctcaagtccgcaatcaaactggccactttggagaatcatttgaaaacctttccaacaggattttaaaagatgatcacgagaaaacgatcggagagggtgaatctgataaggaatatatgaagagcagggttttcataagtcgttggaggaaggtactgcgtgaggctggtggcatctcaggggttgtagttctaaattccaggtaccaagctgcgaatcttcgtttttttaaggaattctcgatctttatggtgtataggctctgggttttctgttttttgtatctcttaggattttgtaaattccagatctttctatggccacttagtagtatatttcaaaaattctccaatcgagttcttcattcgcattttcagtcattttctcttcgacgttgtttttaagcctgggtattactcctatttagttgaactctgcagcaatcttagaaaattagggttttgaggtttcgatttctctaggtaaccgatctattgcattcatctgaatttctgcatatatgtcttagatttctgataagcttacgatacgttaggtgtaattgaagtttatttttcaagagtgttattttttgtttctgaatttttcaggaatgaaagtgagactataaaaaacattgttgaaaatgttacacgtttgttagacaagatagagttgccccttgtcgataatccagtgggagtagaatctcgagtacaagacatgattgagctactagacctaaaccacaaactaccaaattcaaatgatgttttgctattaggaatgtggggaatgggaggcattggtaaaacaaccattgcaaaagccatttacaataagattggccgcaattttgagggaaggagcttccttgaacaaattggggaacattggaggcaagacgcaattcgtttccaagaacaacttctatttgatatctacaaagaaacgaaaagaaagatacataatgttgaattaggaaaacatgctttgaaggaaagactttgcagtaaaagggtatttcttgtacttgatgatgtgaatgacgtggagcaattgagtgctttgtgtggaagtcgcgaatggtttggttcagggagtagaataatcatcactactagagataagcatattcttagaggggatagagttgacaaagtgtacataatgaaaggaatggataaaagtgagtctattgagctttttagttggcatgcattcaagcaagcaagtccaagagaaggttttactgaactttcaaataatgtaattgcatattctgggggtttgccactagctcttacagtccttggttgtcatttgtttgatatgaagataatagaatggaaggctgtattagacaaacttaagagaattcctcatgatcaagtacaaaagaagttaaaaataagctatgatggtttaagtgatgatacagagagagacatattccttgatatagcttgtttctttattggaatggatcggaatgatgctatatgtatcttaaatggttgtggacttttcgcagaaaatggaatacgtgttcttgtagagcgaagtcttgtaactattgatgataagaacaaacttggaatgcatgatttgctacgagacatgggaagagaaatcattcgtgcaaaatcaccaaaggatcttgaggagcgtagcaggttatggtttaatgaggatgtgattgatgtattatcaaaaaaaactgtaagactttcattcattgctttcggatttaaaatttctaaagtcaaaggaaataaaatacacacaagttagttattaacattcatttgtatgaatgattgtcacagaaactttaaaaattagtttgtttgtgaatttttttatgcttcctagcttccattaacaaatgatagattccttcgtgagatttttagttaccttgtatctttaagctggcatactttaccattttgtttttcttgtcatagggaacgaaaaccattgagggtctggctttgaagttaccattaactaattcaaattgttttagcactgaagcatttaaggatatgaagaaactcagattgcttcaacttgctggtgtacaacttgatggagattttgaatatctttccaaagatcttagatggctttgttggcatggatttcctttaaaattcatacccaaaaactttcatcaaggaagtctagtttccatcgagttagaaaacagtaatgttaaacttgtatggaaagagccccaggtattaatttagttttggcatttcatgaattgttttcccttttctaatttatggatgcattttaaattaagtgtctcaaatattaacattatgtcattacatggtacttttagacataaatttcatctatgattttctttttagtctctcttatattgcaattacttttagtaaaactttacaaaatgtagtcaagctatcaagtatattattagttatgatggaacattagctcttctaacttttcttttggagaggaagctcttctaacttttaaacttatggtattgccaactttttccaaaaatttagtatatgggaaaaatgtttgtttcactttaaatgtaagattatctaatcaaattacttcccctaactgtaaatcaaaattcaatatcatggagattatctagtcaaatgaattttatttgtttattatcttatttgaaagctctttttcaacccaaaagatgaagcacatgtctattttgtttactataaatttacataaaacctcttgtgaaaaactttaatgtaatgaaataaaggaggtaagaattgcaatattgactactggattaaagaagctataattcaaattttaaaacatatctatcatcccaaatttaaactctctttgaatgctcataaagaacttttaatagtttgtgataaatataaacacaaatgtagccttaatggatgacgttgaaaggcttgtgttgctagtaaaaaaatgatagtacatgaatataaatatttaacttttttacttgaaaggtttgtgacacaccgtaattgctttcatgtatttgttaaaaagtatatcgaatttttatatatggtatttattttcttgcagttgatggagaaattgaaaattctcaatcttagtcattctcataatttaacacagaccccagacttttccaatttgcctaatctggaaaagctagtgctgatagattgtccaaggttgtttgaggtctcccataccgttggacatctcaataaaattcttatgataaatttgaaagattgtattagccttcgtagccttccaaaaagtatctacaagttgaaatctcttaaaacactcattctctctggatgtttgaagattgacaagttggaagaggacttggaacaaatggagtctttgacgacccttattgcagataacactgcaataaccaaagtgcccttttcaatagtaacatcaaaaagcattggatacatttctttgtgcggctatgaaggattctcacgtgatgtgtttccttctattatttggtcttggatgtcaccaatgagtagtctctcgtcccacattcaaacattcgcaggcatgtcatctcctatttctgtacatgtggctaataatagttccaataatctattatctattttcgaggacattcaaaagcttcgaagtctttgggtagagtgtggaactaaacgtcaactatctcaagaaagaaccatcattttggatgctttatatgccacaaattctaaaggattggaatcaattgcaacaacatcacaattaccaaatgtgaatgcttctactttaattgaatgcagcaatcaagttcacatttcaggatcaaaagattcgttgacatctcttttaattcaaatgggaatgagttgccaaatcgcccataatcttaaacaaaatattttacaggtttcactctctttctctctttcaagtatccaattttatggtttccctctttctctcccacacacacatggaagatgaatatttttatggttatgatattggacaccccactattttatgcgcaattaatacatcatttatctgtatctcttcctattacatcttatcacctatcatacctatatttttctcatttttcttcctctcataggtgtcatgagtgtccaataatcatttttgttatttttaatatataaactatatgtgaaatgtatatatcctgtcagtataaaatattaaaaaatataaaaatgagatcttaaccaccttactttaaaacggtcatacacaccaacatagatgcttttcacactataatcatgcattttgctactaattattggctccgcttaattatatgcataagaattattttttacttaattgggtggatacgtgatgatgatcaacaaaaagaactcatagaaagaaactcttggttagtaatatatattaaagaatcaaaagttatgatttagtaattaaaaatgtattccataatcattactttaatttccaaataattctatagaaaccttttcttatcaaattgataacatagacctctttctcgttcatattactaggctacatatataactagaagtataacgtaggatttactattttttccataaaaatgtacaaatgatgataatttgcaccaatagaacattcttgaaataggtatactactatattaactccttaggagattagtattagtctattcatccttccggaaagaacaagaaatccataaatccgaaaattttacacgagttaaatgtagtcctactaacatgatttgtatataatttgttttatcatttaactaaaataatcttcaaattgcatatcttaatgagtggtataatttgttattaggatttgctaacttacactcacttgtgtttttataagaactaaatttataaattaccccttaggtgtattttaaaaattttgtatttatagtttgctaggttgcttcttttaaaagataactaaatataagttagcaaatcctatatacacttgctaacatacactcacactcacttgttttataaaaggagtaagtaagcaagttacaccttgggtgtctattaaaaaatttaaagttataacttgttaactttctcctagaaaataagtgggtgtaagttaacaaatttttcagttattatcacaatataattttcaaattaaattgagagtgttctctttaaattaaattgatgagtgttctctcagtttttcattttttaaattggtatggtatttttgagttgggctgcttatagtttttgtttaaataacccaagcaaccaaatatttatatgcataacttgaaattagctatttctctacaagcaatcatcatttagaataattaccaatactcaaaagatgtgtttttatattgatgggaaaatgagttattattttgctatatctttaattgttgagctaattgtaaggtgatagtaatttattgttcaaaagacttttgagcatatagatttcatttttacagaatgtgaatactagtgagaacggtggttgtttgctccccggtgatagttatccagattggttaactttccatggagaagattcttctgtgatttttgaaatccctcaagtgaacaaacgtaacttgaagacaatgatgtgccatgtccattattcttccccagtcaatatagcaacagatggcttgaaaaatttgttggtgataaatcacacaaagaccaccattcagctttacaagagtgatgcattagcctccttagaagacgaggagtggcaaagggtattatcaaatatagagcctggtaacaaagtggaaattgttgttgtttttgggagcaggttaactgttgttaacaagaccacgatttatctcatatatgagccaatgaatgaaaaaatggagcactgccatgcaccaaataatggtgatgaaaatgtatgtgctgacaggtcaatctctcctcaaggggaattcaaggatgacgtagggtgtgtttcagtaaaaagagtaattaagtgcttattgaataagtgcttatcatgtaaaagctttactgcaaaatcagaaaagaagaaaagtcaagtaaggttaaaagatggtgaaaggctgtcaggtcaaacttgattcttatggtggctgtaaaccttatattggtgctattgtttgtgttggattgaccaatgatagttttgggcagtggattagtggttttacatgtagattggtgcctactctctggtgccgaggttttctggaaacatatctgcaagagaatgttgctttgtccatgcaacccttgtgaagcactttgctaactgaagctgaagatggatgatacagagcccattaagtatttgatgtgtaacaacaagtgtcaaagcagtggtgattgggtcttgagtactgttgctgaggctagttgctcctctgggaaattcatggacaagaaatgaagctgtgtcgaaattctattggactcatggggatggtgtttttgttaaggggaaaaccatgcacttgatctttgatgatttaagggggctgcaaagctctcctggtaaatctatttagaaacttgtccaatttggccacaaaaacttcaaccacaacctgacagaaaattccctgagtattgtcttaaggtggtaatattgcttttaatttctttgaatgggtttttgtaactatgcgtttgtatcacacaaatgatcctttatttataatgtgattgatttacaatatatggaaacataatattccct

SEQ ID NO: 4 - DNA, 3468 bp, Glycine tomentella
atggttttgcccttcttcacctttccgagacaacaattaattttccttttattggttaaaatggttttgcccttcgtcccctttccgagaccaatgagaccagcaggagcaatgaacaacagaaagtatgaagtgtttatgagcttcagaggagaagacacgcgtgctactttcacttcacatctctatgcggctcttcaaaatgccggaatcattgtttttaaggatgacgaatcacttccaaggggagatcagatctcagactcactgctgctagcaatcgaacaatctcaaatttctgttgttgttttctcaacaaattacgcagattcgcagtggtgtctacaagagttggagaaaataatgtattgtcgaggaaccatagggcaggtggttctgccagtgttctatgatgttgatccttctcaagtccgcaatcaaactggccactttggagaatcatttgaaaacctttccaacaggattttaaaagatgatcacgagaaaacgatcggagagggtgaatctgataaggaatatatgaagagcagggttttcataagtcgttggaggaaggtactgcgtgaggctggtggcatctcaggggttgtagttctaaattccaggaatgaaagtgagactataaaaaacattgttgaaaatgttacacgtttgttagacaagatagagttgccccttgtcgataatccagtgggagtagaatctcgagtacaagacatgattgagctactagacctaaaccacaaactaccaaattcaaatgatgttttgctattaggaatgtggggaatgggaggcattggtaaaacaaccattgcaaaagccatttacaataagattggccgcaattttgagggaaggagcttccttgaacaaattggggaacattggaggcaagacgcaattcgtttccaagaacaacttctatttgatatctacaaagaaacgaaaagaaagatacataatgttgaattaggaaaacatgctttgaaggaaagactttgcagtaaaagggtatttcttgtacttgatgatgtgaatgacgtggagcaattgagtgctttgtgtggaagtcgcgaatggtttggttcagggagtagaataatcatcactactagagataagcatattcttagaggggatagagttgacaaagtgtacataatgaaaggaatggataaaagtgagtctattgagctttttagttggcatgcattcaagcaagcaagtccaagagaaggttttactgaactttcaaataatgtaattgcatattctgggggtttgccactagctcttacagtccttggttgtcatttgtttgatatgaagataatagaatggaaggctgtattagacaaacttaagagaattcctcatgatcaagtacaaaagaagttaaaaataagctatgatggtttaagtgatgatacagagagagacatattccttgatatagcttgtttctttattggaatggatcggaatgatgctatatgtatcttaaatggttgtggacttttcgcagaaaatggaatacgtgttcttgtagagcgaagtcttgtaactattgatgataagaacaaacttggaatgcatgatttgctacgagacatgggaagagaaatcattcgtgcaaaatcaccaaaggatcttgaggagcgtagcaggttatggtttaatgaggatgtgattgatgtattatcaaaaaaaactggaacgaaaaccattgagggtctggctttgaagttaccattaactaattcaaattgttttagcactgaagcatttaaggatatgaagaaactcagattgcttcaacttgctggtgtacaacttgatggagattttgaatatctttccaaagatcttagatggctttgttggcatggatttcctttaaaattcatacccaaaaactttcatcaaggaagtctagtttccatcgagttagaaaacagtaatgttaaacttgtatggaaagagccccagttgatggagaaattgaaaattctcaatcttagtcattctcataatttaacacagaccccagacttttccaatttgcctaatctggaaaagctagtgctgatagattgtccaaggttgtttgaggtctcccataccgttggacatctcaataaaattcttatgataaatttgaaagattgtattagccttcgtagccttccaaaaagtatctacaagttgaaatctcttaaaacactcattctctctggatgtttgaagattgacaagttggaagaggacttggaacaaatggagtctttgacgacccttattgcagataacactgcaataaccaaagtgcccttttcaatagtaacatcaaaaagcattggatacatttctttgtgcggctatgaaggattctcacgtgatgtgtttccttctattatttggtcttggatgtcaccaatgagtagtctctcgtcccacattcaaacattcgcaggcatgtcatctcctatttctgtacatgtggctaataatagttccaataatctattatctattttcgaggacattcaaaagcttcgaagtctttgggtagagtgtggaactaaacgtcaactatctcaagaaagaaccatcattttggatgctttatatgccacaaattctaaaggattggaatcaattgcaacaacatcacaattaccaaatgtgaatgcttctactttaattgaatgcagcaatcaagttcacatttcaggatcaaaagattcgttgacatctcttttaattcaaatgggaatgagttgccaaatcgcccataatcttaaacaaaatattttacagaatgtgaatactagtgagaacggtggttgtttgctccccggtgatagttatccagattggttaactttccatggagaagattcttctgtgatttttgaaatccctcaagtgaacaaacgtaacttgaagacaatgatgtgccatgtccattattcttccccagtcaatatagcaacagatggcttgaaaaatttgttggtgataaatcacacaaagaccaccattcagctttacaagagtgatgcattagcctccttagaagacgaggagtggcaaagggtattatcaaatatagagcctggtaacaaagtggaaattgttgttgtttttgggagcaggttaactgttgttaacaagaccacgatttatctcatatatgagccaatgaatgaaaaaatggagcactgccatgcaccaaataatggtgatgaaaatgtatgtgctgacaggtcaatctctcctcaaggggaattcaaggatgacgtagggtgtgtttcagtaaaaagagtaattaagtgcttattgaataagtgcttatcatgtaaaagctttactgcaaaatcagaaaagaagaaaagtcaagtaaggttaaaagatggtgaaaggctgtcaggtcaaacttga

SEQ ID NO: 5 - protein, 1155 aa, Glycine tomentella
MVLPFFTFPRQQLIFLLLVKMVLPFVPFPRPMRPAGAMNNRKYEVFMSFRGEDTRATFTSHLYAALQNAGIIVFKDDESLPRGDQISDSLLLAIEQSQISVVVFSTNYADSQWCLQELEKIMYCRGTIGQVVLPVFYDVDPSQVRNQTGHFGESFENLSNRILKDDHEKTIGEGESDKEYMKSRVFISRWRKVLREAGGISGVVVLNSRNESETIKNIVENVTRLLDKIELPLVDNPVGVESRVQDMIELLDLNHKLPNSNDVLLLGMWGMGGIGKTTIAKAIYNKIGRNFEGRSFLEQIGEHWRQDAIRFQEQLLFDIYKETKRKIHNVELGKHALKERLCSKRVFLVLDDVNDVEQLSALCGSREWFGSGSRIIITTRDKHILRGDRVDKVYIMKGMDKSESIELFSWHAFKQASPREGFTELSNNVIAYSGGLPLALTVLGCHLFDMKIIEWKAVLDKLKRIPHDQVQKKLKISYDGLSDDTERDIFLDIACFFIGMDRNDAICILNGCGLFAENGIRVLVERSLVTIDDKNKLGMHDLLRDMGREIIRAKSPKDLEERSRLWFNEDVIDVLSKKTGTKTIEGLALKLPLTNSNCFSTEAFKDMKKLRLLQLAGVQLDGDFEYLSKDLRWLCWHGFPLKFIPKNFHQGSLVSIELENSNVKLVWKEPQLMEKLKILNLSHSHNLTQTPDFSNLPNLEKLVLIDCPRLFEVSHTVGHLNKILMINLKDCISLRSLPKSIYKLKSLKTLILSGCLKIDKLEEDLEQMESLTTLIADNTAITKVPFSIVTSKSIGYISLCGYEGFSRDVFPSIIWSWMSPMSSLSSHIQTFAGMSSPISVHVANNSSNNLLSIFEDIQKLRSLWVECGTKRQLSQERTIILDALYATNSKGLESIATTSQLPNVNASTLIECSNQVHISGSKDSLTSLLIQMGMSCQIAHNLKQNILQNVNTSENGGCLLPGDSYPDWLTFHGEDSSVIFEIPQVNKRNLKTMMCHVHYSSPVNIATDGLKNLLVINHTKTTIQLYKSDALASLEDEEWQRVLSNIEPGNKVEIVVVFGSRLTVVNKTTIYLIYEPMNEKMEHCHAPNNGDENVCADRSISPQGEFKDDVGCVSVKRVIKCLLNKCLSCKSFTAKSEKKKSQVRLKDGERLSGQT

SEQ ID NO: 6 - DNA, 10446 bp, Glycine tomentella
atcacaaaacttatttatactattgaaaagtcctaattaaataccacaaaacttatttatataaaaaaaaatcttttaaaattctttgaaatcctaatctaataacccactaaactactaaattaaaatccacaaaagagcaaaaggatacacataaacatgttcacgatggtcataatcagttgtattgggtgaggaatctgccacagcctgatgagaggatatgtaatcttaggaatctaccacaaccctctgacctctgcagcaatctcaaggatggctggagttcaagaaatgcaatcgaccagccaactccattggggtttcagctaatgaacaaggttgtaacttgtacctatttcaaatctaggtttgcaagacacacttgtttttaaattgatcagccagctccattggggttccattgttgtttttttaaattgattttggtggcttgatataaccatcaagaaattgtaatttaaatttcgtaataaataatgacgatttttcagtcgtcaaaaattacattttgaaatagttaataatcatgttattatttaaccgatgacagcgattcaaaatataatttttaacttattagaatccaacacgaaaaaaaatacttattaaaaatccaaaataaaatttgataatatatcctacttgattcgctagcctactaagcgaaatactccctgactgacacgtgtcctaccccaaattcatcagggcaaaccacttaatttgctggttcatgtagcgagctacatgtccaatagggtgacgccacctcaacctaccaatttcgcccacgatgccaacaaattatgccacgtggtattctggcaaatattactataggcgtgacattctggataattttttttgcaaaagtgacactttgaccactgttctaattatgtacacatttttattttagtaaaaaagaaaaaaaaaggaagttacatattattttttctccaaaagtcacgtagtattttatgactttaataaaacattttaaaaaggaatcatatgtataattatgactttaataaaaataataattaagaaaatataaaataatgtaatcgtggttgtattcatgattttcgaaaaaataaaaataaaattaattgtctaagtaaaaatatgaatatatatgactttcattaaattctcgatttacactgtttgagagtaaaatctcaaactctactctttataattattaaaaaaagaaaaaagaaaagaagttgtatgcctttaataaaaaaaaaagttaaaataagttgtgagccttgttacgaattttaaggaaaaaaatattacaagagaaagtcatatactattttatgactttattttattaaataaacataaaattcatatatcataatatgattttattaaagaaatataacaatagaagaggtaaaaagatggaaggctatgtacgaatttaatcaaataaataaataaataagtcctaaataataaaaaataaataaaaaagaaaatctatatgtttacaaaattaataattttttaaaaaagtataaaaaagtatgatgtaattatatttacaactttcataaaaaatatgcaattgttataatgttgtaaattaataaaatttcaaaatttagtccattttagtcataattattcaaaaagattagcctcggtaggtaaaaagtcaatcttacgtcaaaagaaaaagtaatttgaaggaagcatttcgaggaaaataaaataaaagaagatggacactgtaactctataagttgcctcgtagacagaagcctcacattataaagtacagtgcacatttgacgaaaaacaactcgagtttatatgttttattaggaggaaaagaaaaaaaacaaaaaaaaaaagagaagataaaaagcaaactttaaattgtagaaaaaataaaagaaagaaaaagataaaaggaaaagagtatttaaaaaagaatctaattataaattaacacctaccaccactgtagttggtgatcagatcgactgaaaataaagagttgagtgaagtcaaatcttatccttttagtttatagcaaccgattccttacctttgcctttctactctgatcataagttgttcttgaaatcatggatgttgttgaagtggtaggtggtgcgttcctctctgcattctttcaaattgttttggacaagctagcttcaactgaggttgtcaacttggtccgtggaaagaagttgcttaagttgaagaccactctgatagtgattagtactgtgcttgatgatgctgagaagaaacaaagctctgatcccagggtcaattactggctcaatgatctcaaagatgttgtctattacgctgatgacttacttgatgaactttctaccaaagctgtcactcaaaagcaggtaagcaacttgttttctcacttttcaaattggaagatggctagtgagttaaaagacatagttcgcatgttagagaatcttttaaaacgcaaggagaatcttcatttgaaagagattgcagtggagcatgagcatgtgtcatggagagctccaacaatatctctagaagatgagcatgtgtcatggaaagctccaacaatatctctagaagatggatctcaaatatatggtagggataaagacaaggaggccataataaagttgatgttggaggatactagtgatggtaaagaagtgcctgtgatcctaattgtgggaatgggtgggattggaaaaactactttggcccaattagtgtacaatgatgacaatttgattcagatgtttgattttagagcatgggtttatgtttctaaagaatttgatattttgatgatcataaaaactgtgttggagacggttactcaaaagaaaagtaaattaaatgatctaaatttacttcaacttgatttgatggaagcgctgacaggtaaaagattcttaattgttttggatgatgtctggacaaaggaatatgttaattggagttttcttaaactatttcatcatgcggctagtggaagtaaaattcttgtaacaacacgcgatgagaatatagcatctaaagtcctcccagttcaagtttatcatctaacccaattgtcaaatgaagattgttggttggtgtttgcaaaacatgcatgtctttccacagaatccaatgagaatacaacaacactagaaagaattggcagggagattgtagaaaagtgtaatggattgcctttggcagcacaatcacttggaggtatgttgagaagaaaacatgacatcggggaatggaatgatatattaaataatggcctttggaaattttctggaagtgtgattccagcattggaaattagttaccattatctatctccacaattaaagcggtgctttgtttactgttcattgtatcctatagattatgcattttcgaaaaatgaattaatcttgttgtggatggctgagggtcttttaaatccccaaagaaatggaaagactttagaagaagttggtgacgactattttgatgatttgatttcgagatcattttttcaacattcaacaagttggcctcagcacaagtgttttgtgatgcacaatctcgtgcgtgatctggcaatatcccatggtggagaattctatttcagatcagaagaacttgggaaagatatggagattggtgtctacactcgtcatttttcatttaccaaatttggtgatctagtcttggacaactttaaagattttgacaaactaaaatttttgagaactttcttgccaatcaattttaaagatgctccattcaacaatgaaaatgtgccatgtatcataatgtcagagcttaagtacttgagagttttatcattttgtggcttccaaagtttaaatgctttgcctggtgcaataggtaaattgatccatttgcgttatttaaatctctcttacacatgtgtagaaacactaccagagtcattgtgtagtttgtacaatctacaaaccctgaagttgtctaattgcagaaagttgactatgttgcctagtggcatgcaaaatcttgtaaacttgcgccatcttagtattcatggtacttctataaaagagatgcctagaggaatgggaaaattaaacaatttacggcatttagattcctttattgtaggcaagcaccaagagaatgggatcagagaattgggaggacttttaaatcttcacggtccactttctattatccagttggaaaatgtcaccaaaagtgatgaagcattaaaggctagtataatggataaaaagcacattaacagtttatccttggaatggtctgaacctcacaacaatagtcttgacttccaaattgaagtagatgtactctgcaatttacaacctcaccaagacctggttttcctatcaataagtggttataaaggaaccagatttccagattgggtgggaaatttttcctactacaatatgacacatctaagcttatgtaactgtaacaactgttgcatgcttccttcacttgggcaactgccatctctcaaggacctctatatttcatgtttgaattcggtgaagattattggtgcaggtatatacaagacagaagattgttcttttgtgaaacctttttcctcccttgaatctctaactattcataacatgccttgttgggaggcgtggatttccttcgattttgatgcttttcctctacttaaggatcttgaaataggtcattgccccaatctaaggggagatttgccaaatcaccttccggctctggaatcactgacgattaaagattgcaagctgcttgtctcttctcttccaagggctcccgctctccgaagattaaagatacgtggaagcaagaaagtaaggctgcatgagtttcctattttgatggaatctttagaggtagaaggaagcccaatggtgaattccgtgatcaaggccatctcaaatattaaaccaagttgtctacaatctttaaaattgtcagattgttcatcagccttatcattttcagatggtggtttacctgcatcgctgaagagtctaaatatctggggtcttaagaagttggaattcccgacacaacacaaacatgaattgctagaatcacttgaaatacatgacagttgtgattcactcacatctcttccattgattatctttcctaaactcaaacgtctggtacttgtgaagtgtgaaaatatggaatctctcttggtttctctgtcagagtcatctaacaatctgagttcttttgagattcgtgactgtcccaactttgtttcattcccaagagaaggattgcctgcaccctatttgattcgtttcacagttgacaactgcgacaatttgaattcgttgcctgatcagatgagtactcttctcccaaagttacgttatcttcacatagagaactgctcggaaattgagtcgtttcctgaagggggtatgccacctaatttgacattagtagggattgccgattgtgagaaacaactgagaagcatagcatggccatccatggacatgcttacctctctctacgtccagggtccatgttatggaatcaagtccttcccaaaggagggtttgctgcctccctctcttaaatctctgcatctatttgacttttcaaatctggaaacattaaactgcgaggggcttatccatctcacatcccttcaagaattagaaattaatagttgtcaaaagctggagaacatggcaggagaaaggcttcctgcctctctaataaaattaagcatacatgaatgccctatgctgcaagatcgatgccacatgaagcacaaacaaatttggcctaaaatttcccatattcatggcattgatgttggcaggaggagatagtgatcgagcatgatcaccaggtaattctcctgctttaacctacttcatcatctaagtctaaccaaggttcagtcaaggatatgtttcatttcatgtctttcttcgtttatgtttaacttagttattggcttattgcatacaagaagttttagatcagttgctcagcatgatacttgagtggaattggaagtgtaaaccacagcaaattcatttgtttatactttctttacagtgaacattcatgtacttattaatcaaatctgggttctatactttcttgtatgaaagtgtaaaccaagaagaaataaggaatatttaattttccaatcaatccaataataacataatattcataatatagcacctgaagttccctttcattttttgatttgcaaaggatcgaaaacagaaaataactatgaaattaagggtagattatgtatgtagttgagatattgaaactttcggctcacattttactgatgtctcttgtggacaatttagttaatccaattgattttgaaataaaaattaatgcagtatatatgttactgaactacagcgaagcagcacattatcatagccaacatatgggatcgtccaaattgaattgagtgaagaatgttacttatggtcctttagattcaaagaaataactacaggtattagctatgcaacattgataaatccttcagcactcactgaaaaaatgttgctcattaatgtcattgtaggttaactttctcaatatatcagcactcactggtggctgtttcttcatattgcattgtctgtcaatgttgaaagtgtaattggttgtgtactttggttaatatacatgctattattcagttgattgaggtcggggtgaaattcacgagcctggaaaacttatttttgttttttgatttaatcaatgttacagtgaaactttctcaataggtgattttttaattggaaggcttttcattgggtacaatgtgaaggatagaaaggtgtaccaggccagctacatagaatggtctcaagcttcccagttatatactgacaataattgaaaaatactgcataccctttaactgctagccaattcaaattctctgcaacaacatatatgaggttttgccttttccattaatattgtgttttgtgttgtaggaaattgtaatatactgctcttgtgagcaagtcatcacttatgtggtacaatcttcattatatggagagtgtccccaagtagttttgattccaaacaagaacccaggaagtttgatggatgggtgatggctaatgggtaaggtctttgatctttagcattttaattggactaccaaatagcatatgtaatatgtttatggaagtcaaatacatttcatggtgaaactccactacaatagcccatgtttaatttattcacgaccatgatttttttccccatagtattgaaattccataactttcatatttctttctttctttctcaggatacacaacttctaatcaactggacatttcaacattaattttacaatttaattgtagcaaaataataggcattaagcaatgttctcatatatgacttggcaaatatccataatttaccacttattcttaaaacatttataaaacattctttatattttgtttgtgtttgcaggatggggccagaatttcatatatatggaatgtctccgtcctgcttcaattgagaaatagtcaatgtattgatgctttaacacagttttttcatagttgaatacaatcagattgctgcaataaaacaagacatctctgctcattgtctttttcacaaaatttattgtcaaaaacttctcttgctattattcaccaagatgtagttcacaacgtttcaaccacttgctagagatgctttttaacatgacctttcaagaaaattgcattagtatgcatagttaaacatataatatatcgtggaaattatattatcagaaaaacctttgagcaaaacattcatagctcatctgtttatgtgtgtaaagctgatcttcctaggaaaaataaggattaagcgaggacaaggtctgaagatgacagagtcctttggatgagaagagaggagaaaaatgaaaaactcaataggataagattgatccatggtatttcctggagcatataacaccgtcaactccctgacagtacaagccataaggcatacttggccgattgggataggtaataactattaaattctccaacataaagctactttttctatgaggattcatataaaattgataaggatttggatcttcctttaaataccagagattcatgaacgaacttatcaattgcacctttgatttgaaataacaaaatataggtgtctaattataattcctgtctagtatgaatagaagaattgccaaaatatagcttaaacatgatttttttttttaaataagacaatgtttttttcttaatcttatattttattgttcctcccatgcctaacatcaattttgtaacctatgtggaacgaatatagcaaaaatagacaatgattagaaaataaaggattgtgctgtttgagaaggggagtcctaatttcattcttagaatccatcaagcttatcattctttatgctgaattgggaaattggctttgttcttactcattgttatttcttaatttcctttgtattttgctcagagttttgtgttttattaatttgaaagggagatagcatgtgtatacatatcctatgggttgtatgtttggttagcttacaagcttcagaatgaagctagatcctgaattagaatgtccgtatcctaatctcttttaaattttgagctgatactgcaatgagggctttgtttgtttaaagttgtgtatgtcaatggagcgtaagcttcacgcttttaacaaacttttgtgttttctgtttctttgactttaagaaaaatttgggtatgtcacttcctatactccttatgtggggaatactgccaattgactgtccttaattcgaaagagaaactttgaattactgcatttgctatggttgtttacatattttcatcagttgctcatgtcaatgcatgaaatgattgctctcagggctttgttcaaattgacaaggatgatcccaaactacttctggttacatctatcggacctgtcattcaggtatgctgacacaagtgaaaaaatgttgccttgcctttaactagtgcttgttatttctctgcaactacacatttgaatctatataactttttgctgaatattgtggtgcaggaaactataagttactatgctctggagcccctaatgtgtatagggagtgaattccataacaatgtactggttgctcaactcttgacaccaattttcaacgcgagataatttataggttatttgtaattatatgcacgttttattagaataatatttattagaatctaatttatagccatatatcatcatatcatgtataattatttgtatttatagcattcaacctgtacaaaacggactttgttgtgtaatttagacacacgatttcagactctcgtgcctttttttttctccttcaaaaattaactattcaatttccccaattcagaaagtgaagcgagataaatttatcattaaactaatttctaaagcaataatgtattttacgtttgttggtgacctcccaagaataaaatcttcctaatcaatgaaattagtatcctttgctggataatggatattataagtttgcttgacatatgacaacaaatatcaaattggtctttataaacttttgaatgaggtggcaaaattgaaaagaatgacaaagataccttactccaccctattaaacagtaagggtaatgacggaaattaaccatgtttcctttaagtacaatgctaaattaaaacatgaaaactccatctcttcttggttttgacattcctgaccaatgattttttacttttcctgctacatccacaagagcacgaatgaaagaccccacctaaatcttccacatcgctataagaaagtgctgaccagtgtaatataagtttctcttctcaatttattaaggttaattttgacaagaaaaaggaatttgcaaagtgaagttgtgaaagttattgaaaagaaataaaagataattttactgtgtctctcttagatattcttagacatgttttctttctaaaaaaagtaaaatgaagaacacaaaaaagtttaaagacaagttttaaaaggtttctatatcatcataagtaaaagaagtcattgaaaagagaaacattagtaatattttctgaacaataatatagatccgaataagtgttttaaactttttcatagaaattacaaattataataaatgtgagaaatatgatatccaaaattttctagtgtaatttcatgtatgacaaactctaaaaaattggacactaaaataaaattattgcaacaattggtatgagaacaagttttggatatcattttcttcgttagagattcttttaactcctttttattttcttgcggaacgtgtaatatac

SEQ ID NO: 7 - DNA, 10598 bp, Glycine tomentella
tgtaattttactaaaataggttttgggtcaaactatcagtcacacattttaaacatagatcaaacaaatttcacataacttaacatccacaccaagcaattgcacaagggtaatttacacaacaattcaactaatctaaacttatcaaataatcaaataacacaacaaatacatcaaacatctatttcaagttattgaaattacagggcgtttcacaactcacttgtaaggactaaccttttgctagggcgtttcacaactcacttgtaaggactaaccttttgcttggactgaggagtgtgagtagagttttctataattgtaaaatcaatttagtacttcacctatattagtgctacctaattctactgaaccttttgaagtttactgtgatgcctcccatcaaggattgagttcaatgagttgtgtactaatgcaaggagagaaagtggtggcttctactttaaggtatttgaagattcatgagaagaaatatcccactcataacttggagttagtagttgtggtgtttgctttaggcattatctttatggaatcaagtttgaaatttttagtgatcacaagagcttgaaatatctatttgttcaaaaggaaaacatgaaacaaatgcaatagtttgacttgactcgatcatatgcatggttccctatctgatcggttcaatccaaattttaagactattacatgataaaagagaataaaatttaaaaaagaaaagcaaaaataataaaaagttgaaaagaaattgtaggaagaagaaaagcaggaaaatgaggtgataaacgaatgacacatggtccaataaatatttttttctctaaataagatagatagggtagaagataaaagtgtcatttacgagttaaaaaatcaaagttatatacacatttttttattttaataaaaaagaaaaaaagaaagtcgcatactaatttttaccgaaaagtcacgtactattttacaattttattaatttttttaaaagaatcatatatataattatgaatttcataaaaaataattaagaaaatataaaaataatgtaataatgattgaattcatgactaaaaataaaaaaattaatttaattgcttaagtaaaaaatatgaaaatatatggctttcattaaatgctaaggtatctcttattctcaatttaccatgtttgagggtaaattttcataatatactctttttgataattattaaaaaaataaaaagaaaagaagttgtatgtctttaatagaaaaaaattaaaataagttgtgagccttgctaagacttttaagaaaaaaaatattaaaagagaaagtcatatactattttatggctttattttattaaagaaatataaattcatatatcatatgcgattttataaaagaaatataacaaaagaagtggtaaaaaggtcgaaggttatatatgactttaataaaaaataaataaaaataaaatttctgaatatttataatttaataaaaaaataaataaggaaagccatatatttacaaaattagtgtttttttaaatataaaaaattaatttgtaattatatttacaactttcataaaaaaatatgtaattgttataatgttgtaaattaataaaatttcaaaatttagcccattttagtaataattattcaaaaagattagcctcagtaggtaaaagaaagtcaataataacgtcaaaagaaacaataatttgaaggaagcatttggagaaaaataaaagaatcctattagatagacactaactcgataaggtgtctcgtagacagtgtgagcacatgcagaagcctcatattataaagtacagtacacatgtgacgaaaaacaactcgagtttatgtgttttattaggaggaaaaagaaaaaataaaaaaaatggaatttaaattgtagacaaaataaaagaaagaaaataaataaaaggaaaagagtatttaaaaaagaatctaattataaattacacctaccaccactgtagttggtgatcagatcgactgaaaataaagagttgaatgaagtcaaatctcatccttttagtttattgcaaccgattccatacctttgcctttctactctgatcataagttgttcttgaaatcatggatgttgttgaagtggtaggtgaagcgtttctctctgcattcgttcaaactgttttggacaagctagcttcacctgaggtccttggaaagaagaattggcttctaaagttgaagaccactttgatagtggttagtgctgtgcttgatgatgctgagaagaaacaaatcactaataccagtgtcaagcgctggctcaatgatctaagaaatgctgtctatcaagctgatgacttacttgatgaactttctaccaaagctttcactcaaaagcaggtaagcaacttgttttctcacttttttaataggaagatggctagtgagttaaaaggcatagttttcagattagagtgtcttttaaaactcaaggagaatcttgatctgaaagaggttgaaatggagaatgtgtacgggcaggctcagaaagttctaccaacaacatctgtgttagctggatctcatatatatggtagggataaagacaaggaggccataataaagttgctattggaggatactagtgatggtaaagaagtggctgtgatccttattgtgggcatgggtgggattggaaaaactagtttggcccaattagtgtacaatgatgacaatttgaagcagatgtttgattttaaagcatgggtttgtgtttctgaagaatttgatattttgaggatcacaaaaactgtgatggagacggttactcaaaagccttgtgaattaattgatctaaattcagttcaacttcatttgatggaagtgctggcaggtaaaaagttcttaattgttttggatgatgtctggacagaggaatatgttaattggagtcttctaaaaagactatttcaacatggggctaggggaagtaaaattcttgtaacaacacgcaataagaatatagcatctaaagtccacccagttcaagtttatcatctaaaccaattgtcaaatgaagattgttggtttgtgtttgcagaacatgcatgtctttccacagaatccaatgagaatacaacaacactagaaagaattggcagggagattgtaaaaaagtgtaatggattacctttggcagcacaatcacttggaggtatgttgagaagaaaacatgacataggggaatggaataatatattaaataatgacctttgggaactttctggaagtgtgattccagcattggaaattagttattattatctatctccacaagtaaagcgatgctttgtatactgttcattgtatcctatagattatgaattttggaaaaatgaattaatcttgttgtggatggctgagggtcttttaaatccccaaagaaatggaaagactttcgaagaagttggtgacgactgttttgatgatttggtttcgagatcatttcttcaacattcaacaagttggcctcagcaaaaatgttatgtgatgcacaaactcttgcgtgatctggcaatatcccttggtggagaattctatttcagatcagaagaacctgggaaagaaatcaagattggtgtctacactcgtcatttgtcatttaccaaatttggtgatctagtcttggacaactttgaagattttgacaaagcaaaatttttgagaactttcttgccgatcaattttaaagattctccattcaacaatgaaaatatgccatgtatcataatgtcaaagcttaagtacttgagagttttatcattttgtggcttccaaagtttaaatgctttgcctggtgcaatagataaattgatccatttgcgttatttaaatctctctgacacatgtgtagaaacactaccagagtcattgtgtagtttgtacaatctacaaaccttgaagttgtctaattgcagaaagttaactatgttgcctagtggcatgcaaaatcttgtaaacttgcgccatcttagtattcatggtacttctataaaagagatgcctagaggaatgggaaaattaaacaatttacggcatttagattcctttattgtaggcaagcatcaagagaatgggatcagagaattgggaggacttttaaatcttcagggtccactttctattatccagttggaaaatgttacccaaagttatgaagcattaaaggccaggataatggataaaaagcacattaacagtttatccttggaatggtctgaacgtcacaacaatagtcttgacttccaaattgatgtagatgtactctgcaagttacaacctcaccaagacctggttttcctatcaataagtggttacagaggaaccagatttccagattgggtgggaaatttttcctactacaatatgacacatctaagtttatgtaactgtaacaactgttgcatgcttccttcacttgggcaactgccatctctcaaggacctctatatttcatgtttgaattcggtgaagattattggcgcaggtttatacaagacagaagattgttcttttgtgaaacctttttcctcccttgaatctctaaccattcataagatgccttgttgggaggcgtggatttcctttgatttggatgcttttcctctacttaaggatcttgaaataggtcattgccccaatctaagaggagatttgccaaatcaccttcctgctctggaatcgctgaagattgaagattgcaagctgcttgtctcttctcttccaagggctcccactctccgaagattaaagatacgtggaagcaagaaactaaggatgcatgagtttcctattttgattgaatctttagaggtagaaggaagcccaatggtgaagtccatgatcaaggccatctctaatattaaaccaagttgtctacagtctttaaaattgtcagattgttcatcagccatatcattttcagatggtggtttacctgcatcgctgaagagtctaaatatctggggtcttaagaagttggaattcccgacacaacacaaacatgaattgctagaatcacttgaaatacatgacagttgtgattcactcacatctcttccattgattatctttccaaaactcaaacgtttggtacttgtgaagtgtgaaaatatggaatctctcttggttactctgtcagagtcatctaacaatctgagttcttttgagattcgtgactgtcccaactttgtttcattcccaagagaaggattgcctgcacccaatttgattcgtttcacagttgacaattgcaacaagttgaattcgttgcctgatcagatgagtactcttctcccaaagttacaatatcttcatgtagacaactgcttggaaattgagtcatttcctgaagggggtatgccacctaacttgtgatcagtaaggattgccaattgtgagaaactactgagaggcatagcatggccttccatgcacatgcttacctctctctacgtccagggtccatgttatggaatcaagtccttcccaaaggagggtttgctacctccctctcttacatctctgcatctatttgacttttcaagtctggaaacattgaactgcgaggggcttatccatctcacatcccttcaagaattagaaattaatagttgtcataagctggagaacatggcaggagacaggcttcctgcctctctaataaaattaagcatacatgaatgccctatgctgcaagagcgatgcctcaagaagcacacacaaatttggcctaaaatttcccatattcatggcattgatgttggcaggaggagttagtgatcgagcatgatcaccaggtaattctcctgctttaagccacttcatcatctaagtctaaccaaggtttagtcaaggatatgtttcatgtcatgtctttcttcgtttatgtttaacttagttattggcttattgcattcaagaagttttagatcagctgctcagcatgatacttgagtggaattggaattgtaaaccaaagcaaattcatttgtttatactttctttacagtgagcattcatgtacttttaatcaaatctgggttctatactttcttgtatgaagttgtaaaccaagaagaaataagaaatatttcattttccaatcaatccaataataacataatattcataatatagcaccttaagttccctttcattttttgatttgcgaaagaactaaaacagaaaataagtatgaaattcatggtagaatatgtaagtagttgagatattgaaactttaggctcacattttgctgatgtctcttgtggacgatttacctaatccaattgcttttgaaataaaaattaatgtagtatatatgttactgaactacagggaaggaagcagcatattatcataggcaacatatgggatcgtccaaattgaattgagtgaagaatgttacttatggtcctttagattcaaagaaataactacaggtattatgtatgcaacattgataaatccttcaatgtaacatttcactgaaaaaatgttgctcattaatgtcattgtatcttaactttctcaatatatcagcactcactggtggctgtttcttcatattgcattgtctgtcaatgttgaaagtgtacattatgaatttaaaaagcctactcaggtattgagcatttatcaaaagtttacttaataagaacttaattttttttttcaataaataattgtttgtaacttcggaaaaagagaatcgagttgattttcttacatagaatcctcatatatgtgtgagtaacacatatggttgtactttggttaatatacgtgctattattcagttgattgaggttggggtgaattcacgagcctggaaaacttatttttgtattttgaattaatcaatgtgacagtgaaactttctcaataggtgatttttaattggaaggcttttcattggtacaatgtgaaggataaaaaggtgtaccaggccagctacatagaatggtctcaagcttcccagttatatactgacaataattgaaaaatactgcataccctttaactgctagccaattcaaattctctgccactacattatgaggtttttccttttccattaatattgtgtttgtgttgtaggaaattgtaatatactgctcttgtgagtaagtcgtcacttatgtggtaccttcttcattatatggagagtgtccccaagtcgttttgattccaaacaagaacccaggaagtttgaaggatgcgtgatggctaataggtaaggtctttgatctttagcattttaattggactaccaaatagcatattttatggaagtcaaatacatttcatggtgaaactccactacaatagcctatctttaatttattcatgaccatgaatttttttttcccaatagtattgaaattccacagccttcgtatttctttctctctttctcaggatacacaacttctaatcagattgtagcaaatcaataagcattaagcaatgttctcatatatgacttggcaaatatccataatttacttcttattcttaaaacatttataaaatgttctttatattttgtttctgtgtgcaggatgggccagaatttcatatatatggaatgtctccgtcctgcttcaattgagaaatagtcaatgtattgatgctttaacacagttttttcatagttgaatacaatcagattgctgcaataaaacaagacatctctactcattgtctttttcacaaaatttattgtcaaaaacttctcttgccattattcaccaagatgtagttcacaacttttcaatcacttgctagagatgctttgtaacatgacctttcaaaaaaatttgcattagtatgcatagttaagcatacaatataccgtggaaataattatcatcagaaaaacctttaagcaaaacactgatagctcatctgtttatgtgtgtaagctgatcttccaaggaaaaataaggattaagcgaggacaaggtctgaagatgacagagtcctttggagaagagaggagaataatgaaaaactcaataggataagattgatccatggtatttcctggagcatataacaccgtcaactccctaagcgtacaagccttaaggcatacttggcgacttgggatgggtaataactattaaattcaccaacataaagctactttttctatgaggattcatataaaattgataaggatttggatcttcattttaataccatagattcatgaatgaacttatcaatcgcacctttgatttgaaataacaaaatataggtgtctaattacaattcctgtctagtatgaatagaagaattgcaaaaatataacttaaacatgattttttttttttaaataagacaatgtttttttcttaatcttatattttattgttcctcacatgccttacatcaattttgtaacctatgtggaacgtgtatagcaacaatagacgatgattagaaaataaaggactgtgctgtttgagaaggggagtcctaatttcattcttagaatccatcaagcttatcattctttatgctgaattgggaaatttgctttgttcttactcattattatttcttaatttcctttgtattttactcaagagttttgtgttttattaatttgaaagggagatagcatgtgtatacatatcccatcagttgtatgtttgtttagcttacaagcttcagaatgaaaagctatatatcctgaattagaatgtccgtatcctaatctcttttaaattttgagctgatactgcaatgaggtctttgtttttttaaagttttgtatggcaatggagcgtaagcttcaagtcttcatgcttttaacaaacttttttgtgttctgtttctttgactttaagaaaaatttgggtgtgtcacttcctatactccttatgtggggagtacagccaattgactgtccttaattcgaaagagaaactttgaattgctgcatttgctatggttgtttacatattttcataagttgctaatgtcaatgcatgaaataattgctctcagggatttgttcaaattgacaaggatgatcccaacctactctggttacatctcctatcggacctgtcattcaggtatgctgacacacaattgaaaaatgttgccttgcttttaactagtgcttgttatttctctgcatctacgcattttgaatctatacctttttgctgaatattgtggttcagggaactataagttactatgctctggagccctaatgtgtacagggagtgaattccataacaatttactgtttgctgaactcctgacaccaatgttcaacgcgagataatttataggttatttgtaattataggcacgtcttatgagaataatatttattagaatttgattcataggcatatcatcatatcatctataattatttgtatttatagcaatcaacctgtacaaaatggactttgttgtgtaatttagacacacgatttcagactcgtgcatatttcttttttctccttcaacaattaactattcaatttccccaattcagaaagtgaagcgagataatttattagtaaactaatttctaaagcaataatgtattttacgtttgttggtgacctcccaaaaataaaatcttcctaatcaatgaaattagtatcctttgctggataatagatattacaagtttgcttgacagatgacaacaaatatcaaattggtctttataaacttttgaatgatatggcaaaattgaaatgaatgataaatatagcttactccacactgttaaacagtaagggtaatgacggaaattaaccatgtttcctttaagtacaacgccaaattaaaacatgaaaacttcatctcttcttagttttgaccttcctgaccaatggtttttacttttcctgctaaatccacaagagcacgaatgaaagaccccacctaaatcttccacatcgctagaagaaagtgctgaccagtgtgattttatgtgccagtgtgaacttagagcatagtggaagaacctattttaatattttttgggtctcataatattacataagcgacaataatttggtcattttttctctagtgatagaatccaatttggattcttggattttccttgcacagtcaagaaaaaagaacctttcttttccttcaaatggtactaaactttaaaaaaaataggaattcttccctaaaacctaacatttagcatggaaaactcgtgaacaaaaattgtagtagatctagtagacaagggttcttgagctgatcttttatgcatcctaccaaaaggtgtattatgaaaatgatcatgtttagatacttgagtgtctgaatcagaagcagaggaaagtgtcacatctgccacatattcctcaagcttccaccttggggaaactgaaactctcaattttgttgtgatgggagtttcatcccaagaatgtacttgactgccatttagatctgataaagcaaccatcagtctgatgaatccttgtaatctcccgggctcttgtgtagactcaaaatgattt

SEQ ID NO: 8 - DNA, 28 bp, Artificial
  Assay component, Primer
cggtgatagttatccagattggttaact

SEQ ID NO: 9 - DNA, 24 bp, Artificial
  Assay component, primer
acttgagggatttcaaaaatcaca

SEQ ID NO: 10 - DNA, 16 bp, Artificial
  Assay component, probe
catggagaagattctt

SEQ ID NO: 11 - DNA, 10158 bp, Glycine tomentella
ttttattttttttaagtgggctgacccactgacccactaacccactttaaagtgggacggactagtattttcagcccactttacaaaagtgagccagcccagcctgattcacttttttagtgggttgggccagcccggcccgtttttgggtgggctgacccactttaccatccctatctctagaagatacatcaaagactttgtttatagcacctcattaattgtgcaaactgcatccatttccaaatagatttaaccccattctagtgtaatatttggtatttcaagaggtgacaggggaaacatcgtcgttaaagacgatttctgacaataaaaaatggaggttggtgggaagggatgaagggtttggtatgaaataacctaaaatattaagattaatctaacaattaggaatcatgttccaaaatgaaccacctatcaaggtgatctattgtaacaatggtcatctttaaattcaatcttagcattaaaatagttaacaagtactttaaggttgtgaaaaaataaaagagaaagaaaaaaaattcaaaattatatatggattttacacctttttctcattctctttcatttttttctcttccacacaaccaaacctatcctaaaaaacaaatagataaaaaaaagacaaataaagaaatgacaaacaataaaaataataataaatagttaaatttattttcaaaagtgtgatgcaataagaaattgatcattaaaaaatgaaaaatacaaattttatacttaaatatgcaaaagtgtgacaaaacattagtcctatcataaaatttgtaaatcattttgtcattaaattaaaatattaaaaatctaatttgaaaataaattatatttttcaggaccaaatttatattaagttataaaatttaagaattaatttattattaaattattcacatgattaatttatcattttttttcatatttagagaaaaaaattattttttgatctttcaaaattaatttatcgttactttacaatttcaagggtaaatttcactattaacccttaaaataaaggaaggaaacggcgcattcctgcccaatgccttttgtcgtttctatttcgataaaaacgcgtataaagcgtgtggactaggtttacctttgttagtgcacggaaatttcctttggtataaaaatagtaaaaagttacattttattatttattaattttattttatttaaatttctttaaataaaagaaaaatcaagtggacctatttcgtttcattgcatgattttattttatctatttaatttgtaaaagtgaaattttcttcttctttttaaactaaaccttgcacacaattgaataaatatttttatgtcatttaatatttattaattaatttatcaattagtcttatcaaatactttaaattaaattaacttataaactttcaattactttttaacttttcaactactaacttataagtttttaatttatcaaacataatttagactaaaaaaacaagtttttaacattttttgacatattatttaaaatgttagaatctaacttgtaattttatttttatatttattcccttttattatatttctttttaaaaaaatttatttaaggtaaaatttattatttttatcccttttttacatatgacaggactttatcatttcttcctttttattacgatattgaaaatggtatataataagtttatgtagtttttatttatttatttttggataatttataaataaaaatcacaacaattaatttttaaacgcgcatttctttggtccaggactttggtcacaacaataactgataattaactattaaaatattagcaatgaggtgggtttttataccgtgtattttaaaatttttaatttgacggaatattcttagcaatgcttataggttaaaatggttttgcccttcttcacctttccgagacaacaattaattttccttttattggttaaaatggttttgcccttcgtcccctttccgagaccaatgagaccagcaggagcaatgaacaacagaaagtatgaagtgtttatgagcttcagaggagaagacacgcgtgctactttcacttcacatctctatgcggctcttcaaaatgccggaatcattgtttttaaggatgacgaatcacttccaaggggagatcagatctcagactcactgctgctagcaatcgaacaatctcaaatttctgttgttgttttctcaacaaattacgcagattcgcagtggtgtctacaagagttggagaaaataatgtattgtcgaggaaccatagggcaggtggttctgccagtgttctatgatgttgatccttctcaagtccgcaatcaaactggccactttggagaatcatttgaaaacctttccaacaggattttaaaagatgatcacgagaaaacgatcggagagggtgaatctgataaggaatatatgaagagcagggttttcataagtcgttggaggaaggtactgcgtgaggctggtggcatctcaggggttgtagttctaaattccaggtaccaagctgcgaatcttcgtttttttaaggaattctcgatctttatggtgtataggctctgggttttctgttttttgtatctcttaggattttgtaaattccagatctttctatggccacttagtagtatatttcaaaaattctccaatcgagttcttcattcgcattttcagtcattttctcttcgacgttgtttttaagcctgggtattactcctatttagttgaactctgcagcaatcttagaaaattagggttttgaggtttcgatttctctaggtaaccgatctattgcattcatctgaatttctgcatatatgtcttagatttctgataagcttacgatacgttaggtgtaattgaagtttatttttcaagagtgttattttttgtttctgaatttttcaggaatgaaagtgagactataaaaaacattgttgaaaatgttacacgtttgttagacaagatagagttgccccttgtcgataatccagtgggagtagaatctcgagtacaagacatgattgagctactagacctaaaccacaaactaccaaattcaaatgatgttttgctattaggaatgtggggaatgggaggcattggtaaaacaaccattgcaaaagccatttacaataagattggccgcaattttgagggaaggagcttccttgaacaaattggggaacattggaggcaagacgcaattcgtttccaagaacaacttctatttgatatctacaaagaaacgaaaagaaagatacataatgttgaattaggaaaacatgctttgaaggaaagactttgcagtaaaagggtatttcttgtacttgatgatgtgaatgacgtggagcaattgagtgctttgtgtggaagtcgcgaatggtttggttcagggagtagaataatcatcactactagagataagcatattcttagaggggatagagttgacaaagtgtacataatgaaaggaatggataaaagtgagtctattgagctttttagttggcatgcattcaagcaagcaagtccaagagaaggttttactgaactttcaaataatgtaattgcatattctgggggtttgccactagctcttacagtccttggttgtcatttgtttgatatgaagataatagaatggaaggctgtattagacaaacttaagagaattcctcatgatcaagtacaaaagaagttaaaaataagctatgatggtttaagtgatgatacagagagagacatattccttgatatagcttgtttctttattggaatggatcggaatgatgctatatgtatcttaaatggttgtggacttttcgcagaaaatggaatacgtgttcttgtagagcgaagtcttgtaactattgatgataagaacaaacttggaatgcatgatttgctacgagacatgggaagagaaatcattcgtgcaaaatcaccaaaggatcttgaggagcgtagcaggttatggtttaatgaggatgtgattgatgtattatcaaaaaaaactgtaagactttcattcattgctttcggatttaaaatttctaaagtcaaaggaaataaaatacacacaagttagttattaacattcatttgtatgaatgattgtcacagaaactttaaaaattagtttgtttgtgaatttttttatgcttcctagcttccattaacaaatgatagattccttcgtgagatttttagttaccttgtatctttaagctggcatactttaccattttgtttttcttgtcatagggaacgaaaaccattgagggtctggctttgaagttaccattaactaattcaaattgttttagcactgaagcatttaaggatatgaagaaactcagattgcttcaacttgctggtgtacaacttgatggagattttgaatatctttccaaagatcttagatggctttgttggcatggatttcctttaaaattcatacccaaaaactttcatcaaggaagtctagtttccatcgagttagaaaacagtaatgttaaacttgtatggaaagagccccaggtattaatttagttttggcatttcatgaattgttttcccttttctaatttatggatgcattttaaattaagtgtctcaaatattaacattatgtcattacatggtacttttagacataaatttcatctatgattttctttttagtctctcttatattgcaattacttttagtaaaactttacaaaatgtagtcaagctatcaagtatattattagttatgatggaacattagctcttctaacttttcttttggagaggaagctcttctaacttttaaacttatggtattgccaactttttccaaaaatttagtatatgggaaaaatgtttgtttcactttaaatgtaagattatctaatcaaattacttcccctaactgtaaatcaaaattcaatatcatggagattatctagtcaaatgaattttatttgtttattatcttatttgaaagctctttttcaacccaaaagatgaagcacatgtctattttgtttactataaatttacataaaacctcttgtgaaaaactttaatgtaatgaaataaaggaggtaagaattgcaatattgactactggattaaagaagctataattcaaattttaaaacatatctatcatcccaaatttaaactctctttgaatgctcataaagaacttttaatagtttgtgataaatataaacacaaatgtagccttaatggatgacgttgaaaggcttgtgttgctagtaaaaaaatgatagtacatgaatataaatatttaacttttttacttgaaaggtttgtgacacaccgtaattgctttcatgtatttgttaaaaagtatatcgaatttttatatatggtatttattttcttgcagttgatggagaaattgaaaattctcaatcttagtcattctcataatttaacacagaccccagacttttccaatttgcctaatctggaaaagctagtgctgatagattgtccaaggttgtttgaggtctcccataccgttggacatctcaataaaattcttatgataaatttgaaagattgtattagccttcgtagccttccaaaaagtatctacaagttgaaatctcttaaaacactcattctctctggatgtttgaagattgacaagttggaagaggacttggaacaaatggagtctttgacgacccttattgcagataacactgcaataaccaaagtgcccttttcaatagtaacatcaaaaagcattggatacatttctttgtgcggctatgaaggattctcacgtgatgtgtttccttctattatttggtcttggatgtcaccaatgagtagtctctcgtcccacattcaaacattcgcaggcatgtcatctcctatttctgtacatgtggctaataatagttccaataatctattatctattttcgaggacattcaaaagcttcgaagtctttgggtagagtgtggaactaaacgtcaactatctcaagaaagaaccatcattttggatgctttatatgccacaaattctaaaggattggaatcaattgcaacaacatcacaattaccaaatgtgaatgcttctactttaattgaatgcagcaatcaagttcacatttcaggatcaaaagattcgttgacatctcttttaattcaaatgggaatgagttgccaaatcgcccataatcttaaacaaaatattttacaggtttcactctctttctctctttcaagtatccaattttatggtttccctctttctctcccacacacacatggaagatgaatatttttatggttatgatattggacaccccactattttatgcgcaattaatacatcatttatctgtatctcttcctattacatcttatcacctatcatacctatatttttctcatttttcttcctctcataggtgtcatgagtgtccaataatcatttttgttatttttaatatataaactatatgtgaaatgtatatatcctgtcagtataaaatattaaaaaatataaaaatgagatcttaaccaccttactttaaaacggtcatacacaccaacatagatgcttttcacactataatcatgcattttgctactaattattggctccgcttaattatatgcataagaattattttttacttaattgggtggatacgtgatgatgatcaacaaaaagaactcatagaaagaaactcttggttagtaatatatattaaagaatcaaaagttatgatttagtaattaaaaatgtattccataatcattactttaatttccaaataattctatagaaaccttttcttatcaaattgataacatagacctctttctcgttcatattactaggctacatatataactagaagtataacgtaggatttactattttttccataaaaatgtacaaatgatgataatttgcaccaatagaacattcttgaaataggtatactactatattaactccttaggagattagtattagtctattcatccttccggaaagaacaagaaatccataaatccgaaaattttacacgagttaaatgtagtcctactaacatgatttgtatataatttgttttatcatttaactaaaataatcttcaaattgcatatcttaatgagtggtataatttgttattaggatttgctaacttacactcacttgtgtttttataagaactaaatttataaattaccccttaggtgtattttaaaaattttgtatttatagtttgctaggttgcttcttttaaaagataactaaatataagttagcaaatcctatatacacttgctaacatacactcacactcacttgttttataaaaggagtaagtaagcaagttacaccttgggtgtctattaaaaaatttaaagttataacttgttaactttctcctagaaaataagtgggtgtaagttaacaaatttttcagttattatcacaatataattttcaaattaaattgagagtgttctctttaaattaaattgatgagtgttctctcagtttttcattttttaaattggtatggtatttttgagttgggctgcttatagtttttgtttaaataacccaagcaaccaaatatttatatgcataacttgaaattagctatttctctacaagcaatcatcatttagaataattaccaatactcaaaagatgtgtttttatattgatgggaaaatgagttattattttgctatatctttaattgttgagctaattgtaaggtgatagtaatttattgttcaaaagacttttgagcatatagatttcatttttacagaatgtgaatactagtgagaacggtggttgtttgctccccggtgatagttatccagattggttaactttccatggagaagattcttctgtgatttttgaaatccctcaagtgaacaaacgtaacttgaagacaatgatgtgccatgtccattattcttccccagtcaatatagcaacagatggcttgaaaaatttgttggtgataaatcacacaaagaccaccattcagctttacaagagtgatgcattagcctccttagaagacgaggagtggcaaagggtattatcaaatatagagcctggtaacaaagtggaaattgttgttgtttttgggagcaggttaactgttgttaacaagaccacgatttatctcatatatgagccaatgaatgaaaaaatggagcactgccatgcaccaaataatggtgatgaaaatgtatgtgctgacaggtcaatctctcctcaaggggaattcaaggatgacgtagggtgtgtttcagtaaaaagagtaattaagtgcttattgaataagtgcttatcatgtaaaagctttactgcaaaatcagaaaagaagaaaagtcaagtaaggttaaaagatggtgaaaggctgtcaggtcaaacttgattcttatggtggctgtaaaccttatattggtgctattgtttgtgttggattgaccaatgatagttttgggcagtggattagtggttttacatgtagattggtgcctactctctggtgccgaggttttctggaaacatatctgcaagagaatgttgctttgtccatgcaacccttgtgaagcactttgctaactgaagctgaagatggatgatacagagcccattaagtatttgatgtgtaacaacaagtgtcaaagcagtggtgattgggtcttgagtactgttgctgaggctagttgctcctctgggaaattcatggacaagaaatgaagctgtgtcgaaattctattggactcatggggatggtgtttttgttaaggggaaaaccatgcacttgatctttgatgatttaagggggctgcaaagctctcctggtaaatctatttagaaacttgtccaatttggccacaaaaacttcaaccacaacctgacagaaaattccctgagtattgtcttaaggtggtaatattgcttttaatttctttgaatgggtttttgtaactatgcgtttgtatcacacaaatgatcctttatttataatgtgattgatttacaatatatggaaacataatattccctaataatgattgtcatccctaataatcagttgcagatattttttaattacaaaccatattccctaataatggcggtttttgcgttcagcaacaccattttgttatggtgtatgggcacatgatgtctggcaaagaatcccctgagtttaaaaaggactaaaactgagacgacaaatattctgttgcattattagtttgtaaaattttgattgagaagctgagctgattttgaatttcagcttaaaaacttcaaaaaataggaaaaacattagaatgatgcttcattagaaagatccaagtacaaagagaaaagttgtcaataaaagtgacaaaataaaaatatcctaatgtgaaacagactctactaggaccctaaatattgttgtgaactaaggcaaaaggtgacacaaaacacttattgacacgaggatcgtaattggtacaagtatgtatacctaactgacatgactcgtattgaaaggacttaacattaaaaaaactaggaactaataaatgcaatttctctagactcgaggtgcctaaggcgttgatgtgcgaaagctggagatgcagatgagacacaagcaattggaggtgtgagctaatataatccttcagacttatgtcctgctccaatcgctcatccagtgtgtcgatcttgcacaagaacatatttattaacaaataagaccaaaagatcaagagtgcgggtgagttcgctaatagagattaaattaaaaggacaaccagaaaaaaataagacaaaatttaatgtaagttatggaagaggatgtgtttgtttgatgcctcaaacctcaatttaagagccatttgcaagagttacagtaggcaagttgtccgaaaaattcaaggaagaaaaaagatattggttacagtcatatgttcaaagacaccagaatataggatccaaggtcaaacagaggaggactgagaaacaaaggctacaagattactagactgtgccataaaggtaataggtg

SEQ ID NO: 12 - DNA, 5187 bp, Glycine tomentella
atggcttctatctccggcgtccagagcagctcttctgcatatgacgtgtttctcagcttccacggtgaagacacacgcaacaacaacaacaacttcacaggttttctttttcaagctctcagaagaaaaggcatcgtcgccttcaaaggtcatacacttcccgaaaagggtgaacccgggctgttacatgcaattgaaggctcccgccttttcattgtggtcctttcaaagaactatgcttcctcaactcggtgtttgcgtgaactagcacacatcttcaattgcattgaaacttcgccaagacgtcttctgcctattttttatgacgttgatccatcagatgtgcgaaaacagactggacggtacgaggaagccttttggaaacacgaacaaagattcttggtagataaagagaggatggaggaagtgcggacatggagaaaagctctgagtcgagtggccaatctccctggttggtatatcccaaataagccacaatatacagagattgaagaatttgttcaatatataataactatattgggtcctaatatttcaactcttcaaaatgaagcagagggaacatcttcagataaagatgaagtttcatacaatgagctgtcaggcttgatgaggataagagattttatcagcctcgtgttgacttatcctgggaaattagaagatgaaaatattttaagatcttggattagtgcatttcctgaatggaaagctcagttattgtccactggtgatgacactgtgatggacaaaccatggtgtgtactaactgataaggcactgggacctatgaagggatttatgccaatggaaataataagtaaagtagaaagtggtgagagatccatcttcagccataatgatgttgatgcaataccagaagccattctccaacaatctgttgatctcgcagttaaccaactacttcaaactttgttttctggggattactgtgcacgctatatcagactgttaaccagaaacttggctgaaaaaggatctgtagtggacacaatagtttcagccgttgaagataagcacaccatgtttggaattgacaaagattttcttagagccctatggataaatgcctcaacatatgagactgatgcagaggttcgagttcaagaagaaatcgatatcaatatgatgatggaagttgatgacatgggaagcaatgggcagttggtaattgtagtggatgcagatagcaacaacaagctggacctccaaaagttgcgttttccaactggaattgtggtgttgataacaactgagccgtcaacacaagcagagaaggatgttgactttagaattgcatgcacaatggatttgaatatttggacccaggatcatctattgccttggaaagtcttctgcagctatgtcggcagttgtatcagcagtagcatggtaagttcatcaatggccattcagaaaattgcagtggaaatagttaaggaaagccatggtcatcttcttgccattgtccttgtggcaaagtatcttacgtatgtgcaagattttaaacagtgggaacttgcacttgacaaattaagcagtctgaatccttcctatgattatcaagatagtgatcgaattggcattagtagagtcatggtcaatgcattcgtaaatattatttgggaagacattgatgatgcacaaaagctttgccttgaactcagtttgcctgttcacaacattaaaaatggggtgagagatgatatcttggtgtctgattgggctaagataatatcaggatacacacaagaacttggtgaatacagaaggcaattacaacattacatcaatgagcttcaagaccgttttgtcttgttgaaatatgaaagtggagatgtctatttgccagtagaaacctatgatataataaaatcattgcacacctcaaagccttccatcctaaggcatggtgcattaggattgacagagccaccctacattggacgatggcatagtcttattcagatagaattgatggacaataaaatatgtgaattaccacaatcaccagattgccctaaactcaaagtgttgttgttgcagggcaatgttgatttgatggatatccctgactcatttttcaaccacatgcccctgcttcaacacttggacttatcctacactagtataagggatttacccccttctgtctctaaattaatacaacttcagaaattttatcttagaggctgtgatctcttcatggaactaccacatcagattggacagctaaagaacctcaaagagcttgatcttgatgggactttgatcacccatctgccaatagagatccgagaattgatcaacctgcaaagcttaagcctctgctttgatggaacttccaggtcaacaattattcctccaggattggtatcaaatcttactcaattgaattatttaagcatcaacgttgaccctgaagatgagcgatggaatgagaatgttattagtgtcttgagggaaattttttttggattatggaatttgcagaggttgagtatatatgtcccaaaggctgacctcttggaattcataccactgctaccagctcaaaaatctctcaatttcagattggttgttggtcaacatatgcgacgtttgatatcgcgtgtaccacctgaactggagacaaaatttaaacactgtgactatagcataaagtttgttaatggtgtgaatgttccaaatggagtgaaaatgcatcttgaacgcttcaaagccttgtacctagaccgacatatgaccatcaagagtctctctgatttcgatttgaggaatttatgggggttggaagtatgcatattggcagagtgtaatgaaatggaaacaattgtcagaggaagcaattctctaatgttgaagtttttgagcgtattctatatgaagaatttaagaagcatctgcgaagggagtagtcccttctttctctgcttaaagtctatagcattacacacttgccccatgttaaccaccatcttcaccttagattctcttgaaaaactttcctttttggaggagattattattgaagactgtccaaaagtaaccaccctgataagtcatgccacaccagaacaaaaaccagtgtttttcctccccaagttgagaatgatatcgcttctctatcttcctgaattggtcaacattttcaatggcatgcatgttggaccttttatagaagaaatgatattttattattgcccaagtctccaaagtctttccaaatcagagttgtcaagcaaatctttgaagatcatcaaaggagaaagcatctggtgggaagcattgaaatggaatgtagcagagtggggagatgctggtcgacccaattattttgagcgaattttttcaccaattaacgaggaggctgacatgatgaaccggctagctgcacttcaagagactcaactaaatgaatatcacaatacgacttatcagggaatttcaagttctacacagtcgatagcaaagtcatctttggaaatacctgttttgtcacctttagccccagtttcatctgtgggtaggggtagttcaaacagtgaagcccaaaagcggaaagtcgttactgagccaaaaatattacaagatgcatcaaaaaaggttcgtgaacaaagaacagttcaaactgaagtttggacagaacctgaagtttggacggaaaagataagtgtcaatgcggacggttctttagatgatggatatagctggagaaaatatgggctaaagaaaatccttggagctaagtttccaagaggatattacaaatgcacatatggatctgaacgagggtgcccagcaagaaaacaagttcaaaggttagacgaaaacccagcaacatttgagataacctaccaaggaagacatacatgcaccaaagaacagaatttgatcattaagagtggggatgagggaatttcaagttctacacagtcgatagcaaagtcatctttggaaatacctgttttgtcactttcagcccctgtttcatctgtgggtaggggtagttcaaatattgaagcccaaaagcggaaagtcgttactgagccaaaaatatttcaagatgcatcaaaaaagtgcaatttaatcgtgaagaaaggaaacttggggcgtgatctctctgtgatgtgtgggacttttaaggatggggatctgcttgtcaacagggatggagttcgaattgtctctcagaatgatgtcgaagcgccacctcaaatcaagccgacagacaaccagttaactttggcagatatagatgtaatcaaagttgttggagagggaaatggaggggtagttcaattggtgcaacacaaatggactcgtcagttttttgtgttgaaggtaattcagatgaatattgaggagtctatgcgcaagcagattgcacaagagctgaaaattactcaacaagcacaatgtccttatgttgttgtctgctaccaatcattctatgaaaacggtgtcatatcaatcctcttagagtacatggatggaggttccttagctgatctgctgaagaaagttaaaacaattccggaggattatcttgctgccatctgtaagcaggtgctgaagggtttagtttatctccaccacgaaaagcatattatccacagagacttaaaaccttctaatttgttaataaatcatattggtgaagtaaagattactgactttggtgtgagtacaattatggaaagtacatctggtcaagcaaatactttcattggaacctacaactatatgtctccagagagaatcattggaagccagcgaggatacaactacaaaagtgatatatggagtttgggactaatattactcgagtgtgctttgggtcggtttccatatgcaccgcctgatcaaagtgaaacatgggaaagcatttttgagcttatggaaactattgtcgataaacctcctcctagtcctccatctgaacaattttctacagaattttgctcatttatctcagcatgtctacagaaagacccaaaggatcgactgtcagctcaggaattaatggcacatccttttgtcaacatgtatgatgacttggaggtggatctttcagcttacttctcgaatgcagatgagttgaagaaccagctcctagagtcacttcaaggattctgtatttag

SEQ ID NO: 13 - DNA, 2002 bp, Medicago truncatula
ccttaggaaatatggtggctgtactcattttgatgttgatgaatggtttaactgaattccgtttattatcatttttttttttttttgtattatataaaatgaaatgtatagagttgtacaaaaaaaatgaaaccagagtttagagtttatcaacatagagccaaaagttcacgcgataggggtcaaaatcgaaatatagtgtgaacaaataataaaacataatgaaataaagcaaaatcataaaagaaaaagataaaataatgtttgtacaaaaaaaaaagataaaataatgattgtagtatctaccaaaaaaataataataataatgatggtagtctctcatctgtttgactgaattaaatttatttgacaactttaaatgagttttttctttgataaaaactttaaattatagtataaataatatattataatacctatacacatatatttaaaaagttaagaaaatgggtagaccatgtcatggtttaaaaataaaaaataatttgacaaaaatcataaaaaattaaataaccaagttaataataacaagaatatttaatcatgattttattatattgttgttgacctattgactaatacatactaaaaataaacacacaagaaggagtatggagacctaaaatcgaactcaggattcaacataaaattgttatagtcaaaccattgggttataacaatggggacaataatgaaaatataaaaatgaaccaaaattataaaacaaaaaagataaaataatgatgacaatttctcatttgtttgattggtttggttttatttgacaattttaaatgagttaaataatatttctaatacatacatattaaaaatttaagaaaattgggtagaccatagatccttccgctttatatcaatataattttctcgatgtaaatgggcattttccctcttttgcacaaaaaaaaaaatctcgatgttacattgatatttatgtgcgcctaagactttacattgatatatttatttggtgcgccttcattttttctatattatatcataaattttaaaaacaaagttacaaacacaaagcgcgccttcatttttctatattatatcataaattagaattacgttctcgaagagtcaaaccaacctactgattacgttctcggagagacaaaccaacctagtgatttactactagctaattttggttattcctcgaaagtttactttataatcgtgaaatgttattctgattttcttttgaggccaaaatcgtatccgactcacgagagattgctagtttttcttttgcagccaaattcctttacattttaacaaaagaattttttttttttggtcaagtagccacctagtggctagagcacacacaatttaattgtggagaagtggagtgtctggggttcgaaccccggcccctgcatataatatgcaatatccctaccaactgagctaagctcacgagaattaaaaaaaaagaatattaatctaactaaatatacagttaagcgcaatagaaaaacagacgaacaaaagaaagaaacgttgatatataattattggagaatgctaaccattgttagtattgaaaaatggtgaaaaatgataaatttaactttttaaaagtcaaaatattattgaaatcaatataaacatactacttttgacttctttaaccattaccagagggcaatggttaacgagacccataattattctaaggagctactttgcagataggggatgtccttttttttttttgttgaaagaaattaggggatgtccttatctctttatccctgccaattttcctatttataaataaatatcgagtttatcgctctccacctcaaacgctttctttcttgttcttggtttagggttttcttcacccattagggttagggttcaattttccccttttcaatccccaaatcaaaattcaatcaaaacctcaaatttctcaccttttctcactcaatcatcaatcaag

SEQ ID NO: 14 - DNA, 2505 bp, Medicago truncatula
gttgccatcgtttcatcctagggttttattgttactgttattggcaattagatatctgaaatttggtggcatgcttcagagttagaggatggagttttcaagtttttttggtttttgtttgatgatgttctaagttttttggtttagcttttgctggtctattaatggcatgatgcttcactgatgacaaataacaatgtaatgaagtgtcagttttgattttaagccatattcgtgtattgttaaagcatccaattttgtcaatcaattgatgcttcaagtatttcttttattaatgcaatgaattttcgttttaccttataatccatatgagaactttctttaattttccagttatgtgtatattgattttgtattttgttgtaaagaattaatcatagtgcactgaacctagcaaaacttgggaatttgttgatattgaagctaatttaatcaatagtcttgcttaaatggaataagaatggcgtggtactcttcaaaatatcatgattgcacatttattttccctttaccgcttcacaacatttaattcagcactactatcaattattctctatcaatgcatattcccatgcaccagcaaaagtatgtcatgtaactataaatataggtgcggtgctatcgaaaggcttgccattctcattctaaactcacttagcatcacatgtttgtatcaaaaaatggctttacgtgagtttgagagcttacttgctttgatttgcttgaaaggtcccataatctttgtttattatgtttatggtttatttttatgtgaatatgaaaaccatccagcatcaaaatctaaacgaaggaccgcatattatttaccatcatttttaccaattttcattctcaacaacaccattatttacccaagaaaataattaaacaacaacatattattttccgccaaccgttgctttttctacggacacccaaatgtaaaacacccttaattccaaagatttccaagatataaataaatacaccataaacattcttcttctaacaaagaagacctaaccattgttctaacagtaacacctaaaattcagttacctaacatgtcaaagtgaaaactgagcacaaaaactaaaatcaaaacaccagttaagaaaataattaaacaacaacacaaaattttgcattttgatgtatgaaaagctttaaaaaaagtgactatttctaaaatcacttttaaaaaaagaaacatccaaagtcatgagtgagtcaaaggggttataaacttctgcattaccctaatctttctattcttgaaattccatgagaaaataaacaacagcacataaatgggttaagctttaaaaaaagggataatttgtaaaatcactttttcagacatttttgtttatgcatgtggtaaaagtcatctaaagaacatccaatggaagaatcgtacaaaaaatcattgatctaacagaatggaccaaaacgagattaaaaaaaaacttaaatactcaaacaatcctttttttagttaagaaattaaaacaataccaattaaatatttaaggaaccaaaataacatttaagcctaaattattttgactaacataaatacataattaaaaactattttaaaatttcaatacaacgacacaccttgagagactaaaatgattattattcatattatccattaaaaaggaaaaggagtgcgtgtgaaaagcaggccacacgtatatgggccttgaactcgaattcgaattcgaatcttgtggccacctaaccacttcactaaactcacgaataattggtgaacaattctttacaacgaaactaacgaatatcctaataccagatcctaatgacatttttacccctaaactcttaccctcaacactttcaaaagaatcatcactaaattgtcattttaacacactctagaacctactttgataacgaaaaagtagaaagaaacccgtgctaggtcccacccaatagacaacgcaaaccacaattaccagcgcagtatcacgggtcatgcaccggtcacgtagcgtagataaaacccggaaccaaacttgacctacccccacaaacaagtcattattttattatatttatccttaaaaccctatttctcatttcatttcttctacaaccgtctactctagctcgttagttccgctatcactctactcttctactacttcacttcatcctctttgtttttcagcctagggtggtggtaattattcataactgtttcattatttttccttaatttctcattaattttccgttaatttttcaattagtgtaagctgatctgatttttttcctttgtttttgtttcgaattttgatggatcagccaagatcaagatcgtaatcaacggtaaatattatagttccttcgatctctgttcatttatgcgtcgatcggatttatattttttaatttagtttattttttgttaattttgtttgtaactgataggatttggaagaatcggaaacc

SEQ ID NO: 15 - DNA, 1933 bp, Glycine tomentella
ttttattttttttaagtgggctgacccactgacccactaacccactttaaagtgggacggactagtattttcagcccactttacaaaagtgagccagcccagcctgattcacttttttagtgggttgggccagcccggcccgtttttgggtgggctgacccactttaccatccctatctctagaagatacatcaaagactttgtttatagcacctcattaattgtgcaaactgcatccatttccaaatagatttaaccccattctagtgtaatatttggtatttcaagaggtgacaggggaaacatcgtcgttaaagacgatttctgacaataaaaaatggaggttggtgggaagggatgaagggtttggtatgaaataacctaaaatattaagattaatctaacaattaggaatcatgttccaaaatgaaccacctatcaaggtgatctattgtaacaatggtcatctttaaattcaatcttagcattaaaatagttaacaagtactttaaggttgtgaaaaaataaaagagaaagaaaaaaaattcaaaattatatatggattttacacctttttctcattctctttcatttttttctcttccacacaaccaaacctatcctaaaaaacaaatagataaaaaaaagacaaataaagaaatgacaaacaataaaaataataataaatagttaaatttattttcaaaagtgtgatgcaataagaaattgatcattaaaaaatgaaaaatacaaattttatacttaaatatgcaaaagtgtgacaaaacattagtcctatcataaaatttgtaaatcattttgtcattaaattaaaatattaaaaatctaatttgaaaataaattatatttttcaggaccaaatttatattaagttataaaatttaagaattaatttattattaaattattcacatgattaatttatcattttttttcatatttagagaaaaaaattattttttgatctttcaaaattaatttatcgttactttacaatttcaagggtaaatttcactattaacccttaaaataaaggaaggaaacggcgcattcctgcccaatgccttttgtcgtttctatttcgataaaaacgcgtataaagcgtgtggactaggtttacctttgttagtgcacggaaatttcctttggtataaaaatagtaaaaagttacattttattatttattaattttattttatttaaatttctttaaataaaagaaaaatcaagtggacctatttcgtttcattgcatgattttattttatctatttaatttgtaaaagtgaaattttcttcttctttttaaactaaaccttgcacacaattgaataaatatttttatgtcatttaatatttattaattaatttatcaattagtcttatcaaatactttaaattaaattaacttataaactttcaattactttttaacttttcaactactaacttataagtttttaatttatcaaacataatttagactaaaaaaacaagtttttaacattttttgacatattatttaaaatgttagaatctaacttgtaattttatttttatatttattcccttttattatatttctttttaaaaaaatttatttaaggtaaaatttattatttttatcccttttttacatatgacaggactttatcatttcttcctttttattacgatattgaaaatggtatataataagtttatgtagtttttatttatttatttttggataatttataaataaaaatcacaacaattaatttttaaacgcgcatttctttggtccaggactttggtcacaacaataactgataattaactattaaaatattagcaatgaggtgggtttttataccgtgtattttaaaatttttaatttgacggaatattcttagcaatgcttataggttaaa

SEQ ID NO: 16 - DNA, 1007 bp, Medicago truncatula
gagctctctttatcatcatcaacatcatcgtgtgactttaatcgacccttcattcatggcttttactatatgttctattttgtaatctttttcttttcaagttgtctttttttagagggtttttgaataatttgtcaaatgggtatgcttaggtacttttatgtctttttaatatcaaaatgatgcattttggatatgaatgttgttatgatgctgtctatgaagtggtgctgaaaagggttgttgatgggaattggattcagttgtgctgttattgatttggcccttcttaaaaccttgaatgtaatatattgttccctggatggaggttaatatgatggtgctactagttactactatatcttgttctgtgctctgatttgttgttctgtgatcaaataacttgtttaatccttggatcataagctggcttgagttgttggtttagtttattttttggtatgtttggttttgcggcaatttttccgcgatagctcaaaacctatgctagtttttcacgtctatatagacacgcaacaacacaactgaatgtgagttcaggctcaaacaccaaacagaacatatgctccgtgattgtcagtattaaatctggggcaatgaggttttgtaaaatttctatccggtggcggttaagttcagtattttagtttttgaaagtatatattgaaatctggattgtccgaatgtaacagtcaccagtgtagctcacagtgtaaccttagatgattgtgacccacaaggccacaatccaaatttgttggttttatgatggatgtgtaataatgcaacttttgccctgcatttggtttttatactaaattagtttagaaggataaccaaaagctactaggcagtgatacaatctagacatacggatgttattgatgatatattttacattctggattttatataatctgaatctctattctggagaaatttagccataaagcattttgagtgatcctctgttccttttccttaga

SEQ ID NO: 17 - DNA, 1000 bp, Medicago truncatula
gctgtttcaatactgtggtagtgctataaattggcctactttttgtttcttacagtctattagcctagcagccgttaggcctcttttttaaatgtaataagttgaattcctgaactcgtgaagcttgccccttattgaaccgtagtgtttttggttgcttaataccattaagcattgagttgttttggatttatttgcatttaccgaattttatttggaagatagtaagcgttttttccatgttcacaaatatgccatgaaaaaagcagtaaaatttcaataaaccaacatcatgataaaacaaaagtatgcatcgtatgaaaaaaagtgggtgatgaaatgataagtctaattttggtcgaatttggtcgttgttatttttgcatgaacatctcttttgtacaacctaacaactaatttgctatttttaatatttttgtactgcttttgatttgcttgctcttcacaatattatagtgttgcattagttgttcaattttggttgtacaaataatacaacttttaagcagttatcgtgaatgttagaaaaatcatgtgacttatctctgttattgggtgattgcatttgtttcgtgacttgtctttaatcggttacttattttcaataataaataacaatatagcattattttgtgtcactttcttacttttgattattgaaaagccgtgctcctttgcctgtctcttgagccatgtgattcgtcgtgaattgtgaggacgagatcatatttgagaaagaaaatgtgagctagacgtttctatagctttattacgtagcccttgcaattcaattcagcagggaacatatcaaaatgatttgtattgaaaaaattgttctacctacaaaaatctactttattatttgtactgaacgagaaagtgccacaatacttaattagataagtagacattggagctaatctcaaaattcttgcctgctttttctatcatatatctccatatcactaattaattcatt

SEQ ID NO: 18 - DNA, 1638 bp, Glycine tomentella
ttcttatggtggctgtaaaccttatattggtgctattgtttgtgttggattgaccaatgatagttttgggcagtggattagtggttttacatgtagattggtgcctactctctggtgccgaggttttctggaaacatatctgcaagagaatgttgctttgtccatgcaacccttgtgaagcactttgctaactgaagctgaagatggatgatacagagcccattaagtatttgatgtgtaacaacaagtgtcaaagcagtggtgattgggtcttgagtactgttgctgaggctagttgctcctctgggaaattcatggacaagaaatgaagctgtgtcgaaattctattggactcatggggatggtgtttttgttaaggggaaaaccatgcacttgatctttgatgatttaagggggctgcaaagctctcctggtaaatctatttagaaacttgtccaatttggccacaaaaacttcaaccacaacctgacagaaaattccctgagtattgtcttaaggtggtaatattgcttttaatttctttgaatgggtttttgtaactatgcgtttgtatcacacaaatgatcctttatttataatgtgattgatttacaatatatggaaacataatattccctaataatgattgtcatccctaataatcagttgcagatattttttaattacaaaccatattccctaataatggcggtttttgcgttcagcaacaccattttgttatggtgtatgggcacatgatgtctggcaaagaatcccctgagtttaaaaaggactaaaactgagacgacaaatattctgttgcattattagtttgtaaaattttgattgagaagctgagctgattttgaatttcagcttaaaaacttcaaaaaataggaaaaacattagaatgatgcttcattagaaagatccaagtacaaagagaaaagttgtcaataaaagtgacaaaataaaaatatcctaatgtgaaacagactctactaggaccctaaatattgttgtgaactaaggcaaaaggtgacacaaaacacttattgacacgaggatcgtaattggtacaagtatgtatacctaactgacatgactcgtattgaaaggacttaacattaaaaaaactaggaactaataaatgcaatttctctagactcgaggtgcctaaggcgttgatgtgcgaaagctggagatgcagatgagacacaagcaattggaggtgtgagctaatataatccttcagacttatgtcctgctccaatcgctcatccagtgtgtcgatcttgcacaagaacatatttattaacaaataagaccaaaagatcaagagtgcgggtgagttcgctaatagagattaaattaaaaggacaaccagaaaaaaataagacaaaatttaatgtaagttatggaagaggatgtgtttgtttgatgcctcaaacctcaatttaagagccatttgcaagagttacagtaggcaagttgtccgaaaaattcaaggaagaaaaaagatattggttacagtcatatgttcaaagacaccagaatataggatccaaggtcaaacagaggaggactgagaaacaaaggctacaagattactagactgtgccataaaggtaataggtg

SEQ ID NO: 19 - DNA, 500 bp, Glycine tomentella
aaactttcaattactttttaacttttcaactactaacttataagtttttaatttatcaaacataatttagactaaaaaaacaagtttttaacattttttgacatattatttaaaatgttagaatctaacttgtaattttatttttatatttattcccttttattatatttctttttaaaaaaatttatttaaggtaaaatttattatttttatcccttttttacatatgacaggactttatcatttcttcctttttattacgatattgaaaatggtatataataagtttatgtagtttttatttatttatttttggataatttataaataaaaatcacaacaattaatttttaaacgcgcatttctttggtccaggactttggtcacaacaataactgataattaactattaaaatattagcaatgaggtgggtttttataccgtgtattttaaaatttttaatttgacggaatattcttagcaatgcttataggttaaa

SEQ ID NO: 20 - DNA, 638 bp, Glycine tomentella
ttcttatggtggctgtaaaccttatattggtgctattgtttgtgttggattgaccaatgatagttttgggcagtggattagtggttttacatgtagattggtgcctactctctggtgccgaggttttctggaaacatatctgcaagagaatgttgctttgtccatgcaacccttgtgaagcactttgctaactgaagctgaagatggatgatacagagcccattaagtatttgatgtgtaacaacaagtgtcaaagcagtggtgattgggtcttgagtactgttgctgaggctagttgctcctctgggaaattcatggacaagaaatgaagctgtgtcgaaattctattggactcatggggatggtgtttttgttaaggggaaaaccatgcacttgatctttgatgatttaagggggctgcaaagctctcctggtaaatctatttagaaacttgtccaatttggccacaaaaacttcaaccacaacctgacagaaaattccctgagtattgtcttaaggtggtaatattgcttttaatttctttgaatgggtttttgtaactatgcgtttgtatcacacaaatgatcctttatttataatgtgattgatttacaatatatggaaacataatattccct

SEQ ID NO: 21 - DNA, 409 bp, Arabidopsis thaliana
gtaccaagctgcgaatcttcgtttttttaaggaattctcgatctttatggtgtataggctctgggttttctgttttttgtatctcttaggattttgtaaattccagatctttctatggccacttagtagtatatttcaaaaattctccaatcgagttcttcattcgcattttcagtcattttctcttcgacgttgtttttaagcctgggtattactcctatttagttgaactctgcagcaatcttagaaaattagggttttgaggtttcgatttctctaggtaaccgatctattgcattcatctgaatttctgcatatatgtcttagatttctgataagcttacgatacgttaggtgtaattgaagtttatttttcaagagtgttattttttgtttctgaatttttcag

SEQ ID NO: 22 - DNA, 15 bp, Artificial
  Assay component
tcgagctctggtgtc

SEQ ID NO: 23 - DNA, 16 bp, Artificial
  Assay component
cctcgagctttggtgt

SEQ ID NO: 24 - DNA, 20 bp, Artificial
  Assay component
gagacccattgcgtggaaag

SEQ ID NO: 25 - DNA, 22 bp, Artificial
  Assay component
caacggcgttaaggaataccct

SEQ ID NO: 26 - DNA, 15 bp, Artificial
  Assay component
cttcagcctcatcgg

SEQ ID NO: 27 - DNA, 16 bp, Artificial
  Assay component
tcttcagcttcatcgg

SEQ ID NO: 28 - DNA, 18 bp, Artificial
  Assay component
gacgcccgtgcagtagag

SEQ ID NO: 29 - DNA, 21 bp, Artificial
  Assay component
agtgctcctaaggtgttgcct

SEQ ID NO: 30 - DNA, 19 bp, Artificial
  Assay component
ctttaatccccacaaactg

SEQ ID NO: 31 - DNA, 17 bp, Artificial
  Assay component
ttaatccccgcaaactg

SEQ ID NO: 32 - DNA, 22 bp, Artificial
  Assay component
cagctcatgctcatagtcctca

SEQ ID NO: 33 - DNA, 19 bp, Artificial
  Assay component
aagaccaccgtcctcactg

SEQ ID NO: 34 - DNA, 18 bp, Artificial
  Assay component
ccccgttttcactttaaa

SEQ ID NO: 35 - DNA, 18 bp, Artificial
  Assay component
cccccgtttttactttaa

SEQ ID NO: 36 - DNA, 20 bp, Artificial
  Assay component
gaggcgatacggccaatcag

SEQ ID NO: 37 - DNA, 23 bp, Artificial
  Assay component
cctccatatcctcccttgtgaag

SEQ ID NO: 38 - DNA, 16 bp, Artificial
  Assay component
cgattctccgggtaca

SEQ ID NO: 39 - DNA, 18 bp, Artificial
  Assay component
agctcgattctctgggta

SEQ ID NO: 40 - DNA, 22 bp, Artificial
  Assay component
ggaactggagcaaatggaggtt

SEQ ID NO: 41 - DNA, 22 bp, Artificial
  Assay component
ggtcgaggtttcatgtcgctat

SEQ ID NO: 42 - DNA, 16 bp, Artificial
  Assay component
tcatggacccgtcttt

SEQ ID NO: 43 - DNA, 18 bp, Artificial
  Assay component
tttcatggacctgtcttt

SEQ ID NO: 44 - DNA, 25 bp, Artificial
  Assay component
cttagaatcttgtgcggtgacaaat

SEQ ID NO: 45 - DNA, 24 bp, Artificial
  Assay component
caaactcgtgctttcagattcagt

SEQ ID NO: 46 - DNA, 23 bp, Artificial
  Assay component
ctactaacaaattataaggcact

SEQ ID NO: 47 - DNA, 21 bp, Artificial
  Assay component
actaacaaattatgaggcact

SEQ ID NO: 48 - DNA, 22 bp, Artificial
  Assay component
cctctttgtgagtcgtgtccaa

SEQ ID NO: 49 - DNA, 24 bp, Artificial
  Assay component
tcagtctctctcctcaactacctt

SEQ ID NO: 50 - DNA, 17 bp, Artificial
  Assay component
caggtggcacaacatca

SEQ ID NO: 51 - DNA, 17 bp, Artificial
  Assay component
aggtggcacgacatcac

SEQ ID NO: 52 - DNA, 20 bp, Artificial
  Assay component
ctccagccgtaggatgactt

SEQ ID NO: 53 - DNA, 23 bp, Artificial
  Assay component
ggaggcagttagtgaagaatgtg

SEQ ID NO: 54 - DNA, 16 bp, Artificial
  Assay component
cgagaaggccgactga

SEQ ID NO: 55 - DNA, 17 bp, Artificial
  Assay component
tccgagaaggctgactg

SEQ ID NO: 56 - DNA, 22 bp, Artificial
  Assay component
cctgtgtccggatcacatactg

SEQ ID NO: 57 - DNA, 22 bp, Artificial
  Assay component
ttgcgagatgcaattgagaagt

SEQ ID NO: 58 - DNA, 17 bp, Artificial
  Assay component
aattccaaccccatctc

SEQ ID NO: 59 - DNA, 18 bp, Artificial
  Assay component
aattccaactccatctca

SEQ ID NO: 60 - DNA, 21 bp, Artificial
  Assay component
gaggaggtggtcctagggtat

SEQ ID NO: 61 - DNA, 24 bp, Artificial
  Assay component
cccggaacataagtctctacaaga

SEQ ID NO: 62 - DNA, 17 bp, Artificial
  Assay component
caccgcacaagattcta

SEQ ID NO: 63 - DNA, 16 bp, Artificial
  Assay component
caccgcacaggattct

SEQ ID NO: 64 - DNA, 23 bp, Artificial
  Assay component
cagttttcatggacccgtctttg

SEQ ID NO: 65 - DNA, 24 bp, Artificial
  Assay component
agtggatcctaaaccctaaacaca

SEQ ID NO: 66 - DNA, 18 bp, Artificial
  Assay component
ttgggagggatgggaggt

SEQ ID NO: 67 - DNA, 19 bp, Artificial
  Assay component
cttgggagggattggaggt

SEQ ID NO: 68 - DNA, 24 bp, Artificial
  Assay component
caaggaggtgggttggactataag

SEQ ID NO: 69 - DNA, 19 bp, Artificial
  Assay component
gccagctgcaacatagcct

SEQ ID NO: 70 - DNA, 19 bp, Artificial
  Assay component
tccatgaaaaccgaatctg

SEQ ID NO: 71 - DNA, 20 bp, Artificial
  Assay component
tccatgaaaactgaatctga

SEQ ID NO: 72 - DNA, 23 bp, Artificial
  Assay component
tgaaacgtccaggtacaacgaat

SEQ ID NO: 73 - DNA, 22 bp, Artificial
  Assay component
cttagaatcttgtgcggtgaca

SEQ ID NO: 74 - DNA, 19 bp, Artificial
  Assay component
ctctccctttaattgatca

SEQ ID NO: 75 - DNA, 19 bp, Artificial
  Assay component
ctctcccttttattgatca

SEQ ID NO: 76 - DNA, 23 bp, Artificial
  Assay component
tgatttacctgccaacctctcta

SEQ ID NO: 77 - DNA, 21 bp, Artificial
  Assay component
aagccactcgcaaggaccatt

SEQ ID NO: 78 - DNA, 19 bp, Artificial
  Assay component
accctatggactcctacag

SEQ ID NO: 79 - DNA, 18 bp, Artificial
  Assay component
cctatggactcttacagc

SEQ ID NO: 80 - DNA, 21 bp, Artificial
  Assay component
tcgagtcgggaatgggtagag

SEQ ID NO: 81 - DNA, 22 bp, Artificial
  Assay component
gaaagccaaaccttcaaaccac

SEQ ID NO: 82 - DNA, 22 bp, Artificial
  Assay component
agggatgactatgctgttatag

SEQ ID NO: 83 - DNA, 22 bp, Artificial
  Assay component
aggagggatgactatgttgtta

SEQ ID NO: 84 - DNA, 25 bp, Artificial
  Assay component
ggactcttggagactatgcttatca

SEQ ID NO: 85 - DNA, 24 bp, Artificial
  Assay component
ggcttcagttccacaaccttattg

SEQ ID NO: 86 - DNA, 17 bp, Artificial
  Assay component
caatttggcgactgcat

SEQ ID NO: 87 - DNA, 17 bp, Artificial
  Assay component
aatttggcggctgcatg

SEQ ID NO: 88 - DNA, 23 bp, Artificial
  Assay component
gcatcacacattagctcaaaggg

SEQ ID NO: 89 - DNA, 23 bp, Artificial
  Assay component
tgcaaagaggcatttaagggatt

SEQ ID NO: 90 - DNA, 18 bp, Artificial
  Assay component
tttgtgagtcatgtccaa

SEQ ID NO: 91 - DNA, 16 bp, Artificial
  Assay component
tgtgagtcgtgtccaa

SEQ ID NO: 92 - DNA, 21 bp, Artificial
  Assay component
gccgaatggatcacatgtcct

SEQ ID NO: 93 - DNA, 23 bp, Artificial
  Assay component
tcctcaactaccttttccccaaa

SEQ ID NO: 94 - DNA, 22 bp, Artificial
  Assay component
agacaacaatgtcaatgagtct

SEQ ID NO: 95 - DNA, 20 bp, Artificial
  Assay component
acaacaatgtcagtgagtct

SEQ ID NO: 96 - DNA, 24 bp, Artificial
  Assay component
gtcactccatccatatctagcctt

SEQ ID NO: 97 - DNA, 21 bp, Artificial
  Assay component
gaagccgttgtatccgaggtg

SEQ ID NO: 98 - DNA, 16 bp, Artificial
  Assay component
caggctcacatcctac

SEQ ID NO: 99 - DNA, 16 bp, Artificial
  Assay component
aggctcacgtcctaca

SEQ ID NO: 100 - DNA, 22 bp, Artificial
  Assay component
cgtggctactaccaccagagat

SEQ ID NO: 101 - DNA, 23 bp, Artificial
  Assay component
tcatgtgaacgacttaggaccat

SEQ ID NO: 102 - DNA, 18 bp, Artificial
  Assay component
ccatccatatctagcctt

SEQ ID NO: 103 - DNA, 17 bp, Artificial
  Assay component
ccatatctggccttgac

SEQ ID NO: 104 - DNA, 22 bp, Artificial
  Assay component
gtacctcaagcagtgaactgaa

SEQ ID NO: 105 - DNA, 22 bp, Artificial
  Assay component
gaggtgcaaagactcattgaca

SEQ ID NO: 106 - DNA, 22 bp, Artificial
  Assay component
tgtgtagtagggtgattaaatt

SEQ ID NO: 107 - DNA, 25 bp, Artificial
  Assay component
tattgtgtagtagggttattaaatt

SEQ ID NO: 108 - DNA, 22 bp, Artificial
  Assay component
tgccgaatggatcacatgtcct

SEQ ID NO: 109 - DNA, 23 bp, Artificial
  Assay component
tcctcaactaccttttccccaaa

SEQ ID NO: 110 - DNA, 19 bp, Artificial
  Assay component
ttggtcttgtgaacatagg

SEQ ID NO: 111 - DNA, 21 bp, Artificial
  Assay component
tttggtcttgtgaatatagga

SEQ ID NO: 112 - DNA, 20 bp, Artificial
  Assay component
ccggaggatgaactgatgga

SEQ ID NO: 113 - DNA, 19 bp, Artificial
  Assay component
tggtggccttacaatgctg

SEQ ID NO: 114 - DNA, 14 bp, Artificial
  Assay component
tgccaccgaagtgc

SEQ ID NO: 115 - DNA, 16 bp, Artificial
  Assay component
cttgccactgaagtgc

SEQ ID NO: 116 - DNA, 23 bp, Artificial
  Assay component
ggaggctccaagatcacataagg

SEQ ID NO: 117 - DNA, 20 bp, Artificial
  Assay component
tgatgccatcccactatcca

SEQ ID NO: 118 - DNA, 18 bp, Artificial
  Assay component
aagagaccccatgaagcc

SEQ ID NO: 119 - DNA, 15 bp, Artificial
  Assay component
agaccccgtgaagcc

SEQ ID NO: 120 - DNA, 24 bp, Artificial
  Assay component
caacatgacaaaagagatgaggga

SEQ ID NO: 121 - DNA, 23 bp, Artificial
  Assay component
ggttccgggaatatgtcgttatc

SEQ ID NO: 122 - DNA, 17 bp, Artificial
  Assay component
tgtcaacactcaggtga

SEQ ID NO: 123 - DNA, 18 bp, Artificial
  Assay component
cctgtcaacacttaggtg

SEQ ID NO: 124 - DNA, 21 bp, Artificial
  Assay component
gcctcctccttggagatgttc

SEQ ID NO: 125 - DNA, 25 bp, Artificial
  Assay component
caaggaatcaaggtctcaaatcaca

SEQ ID NO: 126 - DNA, 22 bp, Artificial
  Assay component
agacctcaacagcaatataatc

SEQ ID NO: 127 - DNA, 19 bp, Artificial
  Assay component
ctcaacagcagtataatcc

SEQ ID NO: 128 - DNA, 23 bp, Artificial
  Assay component
ccatgcaacctgaccagtcattc

SEQ ID NO: 129 - DNA, 20 bp, Artificial
  Assay component
ggaccaggaccatacctcaa

SEQ ID NO: 130 - DNA, 21 bp, Artificial
  Assay component
agaagatggtcccatatgtct

SEQ ID NO: 131 - DNA, 18 bp, Artificial
  Assay component
aagatggtcccgtatgtc

SEQ ID NO: 132 - DNA, 24 bp, Artificial
  Assay component
tcaccatgtcatatccatgtcgta

SEQ ID NO: 133 - DNA, 22 bp, Artificial
  Assay component
tgcaatttgcctccgaaagaag

SEQ ID NO: 134 - DNA, 19 bp, Artificial
  Assay component
tagagctgttgacatgttg

SEQ ID NO: 135 - DNA, 21 bp, Artificial
  Assay component
ttagagctgttgatatgttgt

SEQ ID NO: 136 - DNA, 21 bp, Artificial
  Assay component
gactctgctcaggctaagaca

SEQ ID NO: 137 - DNA, 24 bp, Artificial
  Assay component
gggctgattatatggttgctatga

SEQ ID NO: 138 - DNA, 20 bp, Artificial
  Assay component
aagatcgcgttttagaggag

SEQ ID NO: 139 - DNA, 16 bp, Artificial
  Assay component
cgcgttttggaggaga

SEQ ID NO: 140 - DNA, 25 bp, Artificial
  Assay component
ggtcggtgcagactatattaaaggg

SEQ ID NO: 141 - DNA, 20 bp, Artificial
  Assay component
gggtcatcaggcaaggtcat

SEQ ID NO: 142 - DNA, 18 bp, Artificial
  Assay component
tttggttccaagtgtggg

SEQ ID NO: 143 - DNA, 21 bp, Artificial
  Assay component
attgatttggttccaggtgtg

SEQ ID NO: 144 - DNA, 22 bp, Artificial
  Assay component
caccggacagagggatagagtt

SEQ ID NO: 145 - DNA, 21 bp, Artificial
  Assay component
catgcggtaaggagctatgga

SEQ ID NO: 146 - DNA, 18 bp, Artificial
  Assay component
ctcattgacactgttgtc

SEQ ID NO: 147 - DNA, 21 bp, Artificial
  Assay component
agactcattgacattgttgtc

SEQ ID NO: 148 - DNA, 24 bp, Artificial
  Assay component
tgtcactccatccatatctagcct

SEQ ID NO: 149 - DNA, 20 bp, Artificial
  Assay component
gaagccgttgtatccgaggt

SEQ ID NO: 150 - DNA, 16 bp, Artificial
  Assay component
ccatccattcgagcag

SEQ ID NO: 151 - DNA, 17 bp, Artificial
  Assay component
catccatttgagcagtc

SEQ ID NO: 152 - DNA, 18 bp, Artificial
  Assay component
cacaacccacgcggagtc

SEQ ID NO: 153 - DNA, 20 bp, Artificial
  Assay component
cgtagttccacgcgatcagt

SEQ ID NO: 154 - DNA, 19 bp, Artificial
  Assay component
agacttcaatgccgaatgg

SEQ ID NO: 155 - DNA, 21 bp, Artificial
  Assay component
caaagacttcaatgtcgaatg

SEQ ID NO: 156 - DNA, 20 bp, Artificial
  Assay component
ttggacacgactcacaaaga

SEQ ID NO: 157 - DNA, 24 bp, Artificial
  Assay component
gtgttcctacaagacaatgcctct

SEQ ID NO: 158 - DNA, 22 bp, Artificial
  Assay component
cgacatcaaatctaagacaatt

SEQ ID NO: 159 - DNA, 21 bp, Artificial
  Assay component
cgacatcaaatctaggacaat

SEQ ID NO: 160 - DNA, 24 bp, Artificial
  Assay component
agtggatcctaaaccctaaacaca

SEQ ID NO: 161 - DNA, 23 bp, Artificial
  Assay component
ttgtcaccgcacaagattctaag

SEQ ID NO: 162 - DNA, 20 bp, Artificial
  Assay component
accacagctatcagaaaaga

SEQ ID NO: 163 - DNA, 21 bp, Artificial
  Assay component
taggaccacagctattagaaa

SEQ ID NO: 164 - DNA, 24 bp, Artificial
  Assay component
ccaccaagctacctgattccagat

SEQ ID NO: 165 - DNA, 25 bp, Artificial
  Assay component
tgggatgaccttaagagaatgtttc

SEQ ID NO: 166 - DNA, 19 bp, Artificial
  Assay component
ctttcgacgaagattctca

SEQ ID NO: 167 - DNA, 16 bp, Artificial
  Assay component
tcgacgacgattctca

SEQ ID NO: 168 - DNA, 22 bp, Artificial
  Assay component
ttgcaggtgtcgttgtaagttg

SEQ ID NO: 169 - DNA, 19 bp, Artificial
  Assay component
agcagcgacaatggcagag

SEQ ID NO: 170 - DNA, 15 bp, Artificial
  Assay component
tgaccacagctccag

SEQ ID NO: 171 - DNA, 17 bp, Artificial
  Assay component
ttgaccacatctccagt

SEQ ID NO: 172 - DNA, 18 bp, Artificial
  Assay component
ccgcttggaagcatcaca

SEQ ID NO: 173 - DNA, 24 bp, Artificial
  Assay component
tgaggagtgtttcttgagtttgaa

SEQ ID NO: 174 - DNA, 20 bp, Artificial
  Assay component
acagagtacacatgaactac

SEQ ID NO: 175 - DNA, 22 bp, Artificial
  Assay component
tacagagtacacattaactact

SEQ ID NO: 176 - DNA, 24 bp, Artificial
  Assay component
gcattgttgtggcagatatgtttg

SEQ ID NO: 177 - DNA, 23 bp, Artificial
  Assay component
tctcgagggcctatttcatttga

SEQ ID NO: 178 - DNA, 18 bp, Artificial
  Assay component
taagtcttctgaatccca

SEQ ID NO: 179 - DNA, 20 bp, Artificial
  Assay component
tataagtcttcttaatccca

SEQ ID NO: 180 - DNA, 20 bp, Artificial
  Assay component
agaccggatagggatggaaa

SEQ ID NO: 181 - DNA, 20 bp, Artificial
  Assay component
ccgtctgcgtgtctgtgaat

SEQ ID NO: 182 - DNA, 20 bp, Artificial
  Assay component
ttcaaaatggtagacactca

SEQ ID NO: 183 - DNA, 19 bp, Artificial
  Assay component
ttcaaaatggtggacactc

SEQ ID NO: 184 - DNA, 25 bp, Artificial
  Assay component
gatgaagttgataggacacagtgaa

SEQ ID NO: 185 - DNA, 24 bp, Artificial
  Assay component
agtgagagcttgatggaatatgga

SEQ ID NO: 186 - DNA, 20 bp, Artificial
  Assay component
tgagttgttacaagctggat

SEQ ID NO: 187 - DNA, 20 bp, Artificial
  Assay component
tgagttgttacatgctggat

SEQ ID NO: 188 - DNA, 24 bp, Artificial
  Assay component
gaacacaggcattacacaatcaca

SEQ ID NO: 189 - DNA, 23 bp, Artificial
  Assay component
ggaccatgaccacatttgaaagc

SEQ ID NO: 190 - DNA, 15 bp, Artificial
  Assay component
ccgggtccattgtgg

SEQ ID NO: 191 - DNA, 16 bp, Artificial
  Assay component
cgggtcctttgtggaa

SEQ ID NO: 192 - DNA, 20 bp, Artificial
  Assay component
ggtcgcattcaccgagatga

SEQ ID NO: 193 - DNA, 21 bp, Artificial
  Assay component
ccagcattggtccgtggtatg

SEQ ID NO: 194 - DNA, 19 bp, Artificial
  Assay component
ttagttggttcagcaaaca

SEQ ID NO: 195 - DNA, 19 bp, Artificial
  Assay component
attagttggttcggcaaac

SEQ ID NO: 196 - DNA, 25 bp, Artificial
  Assay component
tgcaagaaacaatagcctacaaagg

SEQ ID NO: 197 - DNA, 21 bp, Artificial
  Assay component
gctcccaggctaagataatgc

SEQ ID NO: 198 - DNA, 20 bp, Artificial
  Assay component
atgctttaaattcgttccca

SEQ ID NO: 199 - DNA, 20 bp, Artificial
  Assay component
tgctttaaatttgttcccaa

SEQ ID NO: 200 - DNA, 19 bp, Artificial
  Assay component
tccaaaggcaggcaatagc

SEQ ID NO: 201 - DNA, 24 bp, Artificial
  Assay component
accactcagaatctgtgcaacttc

SEQ ID NO: 202 - DNA, 19 bp, Artificial
  Assay component
actcattgacattgttgtc

SEQ ID NO: 203 - DNA, 21 bp, Artificial
  Assay component
aagactcattgacgttgttgt

SEQ ID NO: 204 - DNA, 20 bp, Artificial
  Assay component
gaagccgttgtatccgaggt

SEQ ID NO: 205 - DNA, 24 bp, Artificial
  Assay component
tgtcactccatccatatctagcct

SEQ ID NO: 206 - DNA, 17 bp, Artificial
  Assay component
tgaaccacgatgtcttc

SEQ ID NO: 207 - DNA, 16 bp, Artificial
  Assay component
tgaaccacgctgtctt

SEQ ID NO: 208 - DNA, 25 bp, Artificial
  Assay component
ggcaacaacctcactagattcattg

SEQ ID NO: 209 - DNA, 21 bp, Artificial
  Assay component
tggttggtgaagtcgtactct

SEQ ID NO: 210 - DNA, 17 bp, Artificial
  Assay component
cactctccaacgtatca

SEQ ID NO: 211 - DNA, 20 bp, Artificial
  Assay component
aatcactctccaatgtatca

SEQ ID NO: 212 - DNA, 21 bp, Artificial
  Assay component
cgtgatctgggacatgagtct

SEQ ID NO: 213 - DNA, 23 bp, Artificial
  Assay component
acctcggatacaacggcttcttc

SEQ ID NO: 214 - DNA, 22 bp, Artificial
  Assay component
aggaatacaagagcagaagctc

SEQ ID NO: 215 - DNA, 23 bp, Artificial
  Assay component
aaggaatacaagaggagaagctc

SEQ ID NO: 216 - DNA, 22 bp, Artificial
  Assay component
ggttcagcaaacaaaggagaca

SEQ ID NO: 217 - DNA, 25 bp, Artificial
  Assay component
aaggacagaggaagtataggaggtg

SEQ ID NO: 218 - DNA, 18 bp, Artificial
  Assay component
tacgattcctctatcttc

SEQ ID NO: 219 - DNA, 20 bp, Artificial
  Assay component
ttctacgattcctttatctt

SEQ ID NO: 220 - DNA, 21 bp, Artificial
  Assay component
gcgtagccttggtggatgaag

SEQ ID NO: 221 - DNA, 19 bp, Artificial
  Assay component
gtcgctgctcctgctcttg

SEQ ID NO: 222 - DNA, 18 bp, Artificial
  Assay component
tccggagaatacatccat

SEQ ID NO: 223 - DNA, 17 bp, Artificial
  Assay component
cggagaatgcatccata

SEQ ID NO: 224 - DNA, 21 bp, Artificial
  Assay component
gggtgcatcgggatttgattg

SEQ ID NO: 225 - DNA, 24 bp, Artificial
  Assay component
agaccagttggtcgataattcttc

SEQ ID NO: 226 - DNA, 22 bp, Artificial
  Assay component
tatatttttacacaatttggtg

SEQ ID NO: 227 - DNA, 20 bp, Artificial
  Assay component
tatttttacacgatttggtg

SEQ ID NO: 228 - DNA, 25 bp, Artificial
  Assay component
cacaaatgatgctaaggtggtgata

SEQ ID NO: 229 - DNA, 21 bp, Artificial
  Assay component
tgttgcagaaatgcgttcctc

SEQ ID NO: 230 - DNA, 17 bp, Artificial
  Assay component
cgaactggcacgatttg

SEQ ID NO: 231 - DNA, 14 bp, Artificial
  Assay component
ctggcgcgatttgc

SEQ ID NO: 232 - DNA, 24 bp, Artificial
  Assay component
tcgagttacattcccacatctgaa

SEQ ID NO: 233 - DNA, 19 bp, Artificial
  Assay component
cgcggtactcacacgacta

SEQ ID NO: 234 - DNA, 20 bp, Artificial
  Assay component
ccagtatgaggtattagacc

SEQ ID NO: 235 - DNA, 21 bp, Artificial
  Assay component
agccagtatgaggtgttagac

SEQ ID NO: 236 - DNA, 21 bp, Artificial
  Assay component
tggcatggctctatgagatga

SEQ ID NO: 237 - DNA, 22 bp, Artificial
  Assay component
cccagttctctggttactcaac
